(19) United States
(12) Patent Application Publication
(10) Pub. No.: US 2012/0210459 A1
(43) Pub. Date: Aug. 16, 2012

(54) Design and Implementation of Novel and/or Enhanced Bacterial Microcompartments for Customizing Metabolism

(75) Inventors: Cheryl A. Kerfeld, Walnut Creek, CA (US); Dominique Loque, Albany, CA (US)

(73) Assignee: THE REGENTS OF THE UNIVERSITY OF CALIFORNIA, Oakland, CA (US)

(21) Appl. No.: 13/367,260

(22) Filed: Feb. 6, 2012

Related U.S. Application Data
(63) Continuation-in-part of application No. PCT/US2010/044455, filed on Aug. 4, 2010.
(60) Provisional application No. 61/231,246, filed on Aug. 4, 2009.

(51) Int. Cl. C12N 15/82; C12N 1/15; A01H 5/10; C40B 40/08; C07H 21/04; A01H 5/00; C12N 1/21; C12N 1/19

(52) U.S. Cl. 800/278; 435/252.3; 435/254.11; 435/254.2; 435/320.1; 506/17; 536/23.7; 800/298

(57) ABSTRACT

Herein is described a bacterial microcompartment catalog comprising a total of 634 gene sequences encoding bacterial microcompartments, the proteins of each can be inserted into a host organism and if needed, expressed using an inducible expression system. Disclosed are at least 32 types of gene clusters which provide microcompartments having metabolizing or other enzyme activity. The expression of these microcompartments can be used to provide or enhance an organism's carbon fixation and/or sequestration activity or biomass production or, generally speaking additional or enhanced metabolic activities to an organism.

### CROSS-REFERENCE TO RELATED APPLICATIONS

[0001] This application is a continuation-in-part of International Application No. PCT/US2010/44455 filed on Aug. 4, 2010, which claims priority to U.S. Provisional Patent Application No. 61/231,246 filed on Aug. 4, 2009, both of which are hereby incorporated by reference in their entirety.

### STATEMENT OF GOVERNMENTAL SUPPORT

[0002] This invention was made with government support under Contract No. DE-AC02-05CH11231 awarded by U.S. Department of Energy. The government has certain rights in this invention.

### REFERENCE TO SEQUENCE LISTING AND TABLES

[0003] The attached sequence listing is hereby incorporated by reference.

[0004] The attached Table 2 is hereby incorporated by reference.

### BACKGROUND OF THE INVENTION

[0005] 1. Field of the Invention

[0006] The present invention relates to method for designing and implementing novel and/or enhanced bacterial microcompartments for customizing metabolism in various organisms such as bacteria, archaea, plants, algae, and other eukaryotes through genome modification. The present invention also relates to modified organisms having enhanced biomass production and CO₂ sequestration abilities.

[0007] 2. Related Art

[0008] Bacterial microcompartments are primitive protein-based organelles that sequester specific metabolic pathways in bacterial cells. The prototypical bacterial microcompartment is the carboxysome, a bacterial polyhedral organelle which increases the efficiency of CO₂ fixation by encapsulating RuBisCO and carbonic anhydrase and other proteins. They can be divided into two types: alpha-type carboxysomes and beta-type carboxysomes (FIGS. 13, 25, 26).

[0009] For many years carboxysomes were the only known polyhedral microcompartments known in bacteria. Subsequently, homologues of carboxysome shell proteins were reported in Salmonella enterica serovar Typhimurium, where they constitute part of a cluster of genes involved in the coenzyme B₁₂-dependent metabolism of 1,2-propanediol (Pdu bacterial micrompartment) and in a second gene cluster, constituting a bacterial microcompartment for the metabolism of ethanolamine. More recently we have bioinformatically extended the observations of the potential to form bacterial microcompartments in diverse species of bacteria; however for many of these the predicted function has yet to be experimentally verified.

[0010] There has been recent interest in using microorganisms and algae in the production and processing of biofuels.

### BRIEF SUMMARY OF THE INVENTION

[0011] The present invention provides method for designing and implementing novel and/or enhanced bacterial microcompartments for customizing metabolism in various organisms such as plants, algae, bacteria, and eukaryotes. It was found that genes with homology to the conserved bacterial microcompartment domains Pfam00936 and/or Pfam03319 along with any other genes that are associated, co-regulated or identifiable as in a gene cluster with these Pfam00936 and/or Pfam03319 homologs, can be inserted into the genome of another organism, thereby providing enhanced or new activity to the transformed organism.

[0012] Various compositions comprising nucleotide and/or amino acid sequences comprising bacterial microcompartments are herein described. Specifically, the present invention provides microcompartment nucleic acids and polypeptides having a sequence set forth in SEQ ID NOs: 1-1268 and variants, homologs and fragments thereof. The present invention further provides compositions and methods directed to enhancing or customizing metabolism in various organisms.

[0013] In one aspect of the invention, an isolated nucleic acid molecule is inserted into a genome of an organism such as a plant, algae, bacteria or eukaryote, wherein the nucleic acid molecule encodes a protein or RNA molecule encoding bacterial microcompartment proteins not naturally present in the organism, thus providing enhanced or new activity. In one embodiment, the present methods and sequences provide these organisms with microcompartments that provide enhanced biomass production and CO₂ sequestration/fixation abilities.

[0014] In one embodiment, the bacterial microcompartment genes or their homologs are isolated from bacteria and clusters of which are grouped into 32 Groups and subgroups and shown in Table 1. Proxy organisms for each Group found in Table 1. In another aspect, an isolated nucleic acid, wherein the sequence is selected from the group consisting of odd-numbered sequences from SEQ ID NOS:1-1268.

[0015] In another aspect, the encoded protein or RNA molecule having biomass production and CO₂ sequestration or carbon fixation activity. In one embodiment, a microcompartment protein expressed in vitro from an isolated gene or RNA molecule and selected from the odd numbered sequences from SEQ ID NOS: 1-1268. In another embodiment, the isolated protein having carbon fixation activity, comprising a sequence selected from even-numbered sequences from SEQ ID NOS: 1-1268.

[0016] The isolated protein or RNA molecule having carbon fixation activity, wherein the protein or RNA molecule or homologs having the potential for bacterial microcompartment formation is isolated from organisms such as those in Table 1. In other embodiments, a cluster or group of proteins or RNA molecule or homologs having the potential for bacterial microcompartment formation is isolated from organisms such as the Groups as defined in Table 3 or any organisms' bacterial microcompartment gene clusters which can be defined as collections of genes that encode Pfam00936 and or Pfam03319 and genes in proximity to or co-regulated with expression of genes encoding Pfam00936 and or Pfam03319.

[0017] In another aspect, the nucleic acid molecule encoding microcompartment expression products, and isolated according to the prescribed method for inserting microcompartment genes in a genome, wherein said nucleotide sequence is optimized for expression in the host organism. An expression cassette comprising the nucleotide sequence operably linked to a promoter that drives expression in the host organism. The expression cassette further comprising an operably linked polynucleotide encoding a signal peptide if required.

[0018] In another embodiment, the nucleic acid molecule comprising a cluster of bacterial microcompartment genes, wherein the cluster comprising more than one bacterial compartment gene. The cluster of genes containing one or more occurrences of Pfam00936 and/or Pfam03319 wherein all contiguous genes are not greater than about 300 bp from one another or are distal in the genome (including in plasmids), but co-regulated/expressed with bacterial microcompartment genes. Thus, in one embodiment, an expression cassette comprising a nucleic acid molecule comprising a cluster of bacterial compartment genes.

[0019] In another aspect, a plant comprising in its genome at least one stably incorporated expression cassette, said expression cassette comprising a heterologous nucleotide sequence encoding a bacterial microcompartment operably linked to a promoter that drives expression in the plant, wherein the plant displays increased carbon fixation activity. The promoter is preferably an inducible promoter. In another embodiment, a transformed seed of the plant displaying increased carbon fixation activity.

[0020] In another aspect, a cell comprising in its genome at least one stably incorporated expression cassette, said expression cassette comprising a heterologous nucleotide sequence isolated according to the method of identifying microcompartment genes from a genome, operably linked to a promoter that drives expression in the cell.

[0021] In another aspect, a method for enhancing inorganic carbon fixation in a photosynthetic organism, said method comprising introducing into a photosynthetic organism at least one expression cassette, said expression cassette comprising a heterologous nucleotide sequence encoding a bacterial microcompartment and operably linked to a promoter that drives expression in the photosynthetic organism. In one embodiment, an expression cassette comprising a nucleotide sequence encoding a bacterial microcompartment sequence and operably linked to a promoter that drives expression in algae. In another embodiment, transformed photosynthetic microorganism comprising at least one expression cassette.

[0022] According to still further features in the described preferred embodiments the genetic transformation is effected by a method selected from the group consisting of Agrobaterium mediated transformation, plasmid-mediated transformation, electroporation, uptake via natural competence and particle bombardment.

[0023] According to still further features in the described preferred embodiments the transformation is effected by a method selected from the group consisting of plasmid-mediated transformation, natural competence for nucleic acid uptake, viral transformation, electroporation and particle bombardment.

### BRIEF DESCRIPTION OF THE DRAWINGS

[0024] FIG. 1 shows the various Groups of gene clusters, their function if known and lists a proxy organism in which this gene cluster is found.

[0025] FIGS. 2A-26A and also 13C show the legend and assign a color and shape for each enzyme or protein that comprises or has activity within a compartment in the Group proxy organism.

[0026] FIGS. 2B, 3B, 4B, etc. to 20B and also 13D show the Group microcompartment cluster as observed in various other organisms.

[0027] FIG. 2A shows the microcompartment gene cluster found in Group 1 proxy organism, Mycobacterium smegmatis str. MC2 155. FIG. 2B shows the Group 1 microcompartment also is present on other organisms.

[0028] FIG. 3A shows the microcompartment gene cluster found in Group 2 proxy organism, Ruminococcus obeum ATCC 29174. FIG. 3B shows the Group 2 microcompartment also is present on other organisms.

[0029] FIG. 4A shows the microcompartment gene cluster found in Group 3 proxy organism, Alkaliphilus metalliredigens QYMF. FIG. 4B shows the Group 3 microcompartment also is present on other organisms.

[0030] FIG. 5A shows the microcompartment gene cluster found in Group 4 proxy organism, E. coli CFT073. FIG. 5B shows the Group 4 microcompartment also is present on other organisms.

[0031] FIG. 6A shows the microcompartment gene cluster found in Group 5 proxy organism, Rhodopseudomonas palustris BisB18. FIG. 6B shows the Group 5 microcompartment also is present on other organisms.

[0032] FIG. 7A shows the microcompartment gene cluster found in Group 6 proxy organism, Shewanella putrefaciens CN-32. FIG. 7B shows the Group 6 microcompartment also is present on other organisms.

[0033] FIG. 8A shows the microcompartment gene cluster found in Group 7 proxy organism, E. coli UTI89. FIG. 8B shows the Group 7 microcompartment also is present on other organisms.

[0034] FIG. 9A shows the microcompartment gene cluster found in Group 8 proxy organism, Desulfatibacillum alkenivorans AK-01. FIG. 9B shows the Group 8 microcompartment also is present on other organisms.

[0035] FIG. 10A shows the microcompartment gene cluster found in Group 9 proxy organism, Blastopirellula marina DSM 3645. FIG. 10B shows the Group 9 microcompartment also is present on other organisms.

[0036] FIG. 11A shows the microcompartment gene cluster found in Group 10 proxy organism, Methylibium petroleiphilum. FIG. 11B shows the Group 10 microcompartment also is present on other organisms.

[0037] FIG. 12A shows the microcompartment gene cluster found in Group 11 proxy organism, Haliangium ochraceum SMP-2. FIG. 12B shows the Group 11 microcompartment also is present on other organisms.

[0038] FIG. 13A shows the microcompartment gene cluster found in Group 12 proxy organism, Anabaena variabalis. FIG. 13B shows the Group 12 microcompartment also is present on other organisms. FIG. 13C shows the microcompartment gene cluster found in Group 12A proxy organism, Trichodesmium erythraeum. FIG. 13D shows the Group 12A microcompartment also is present on other organisms.

[0039] FIG. 14A shows the microcompartment gene cluster found in Group 13 proxy organism, Desulfotalea psychrophila LSv54. FIG. 14B shows the Group 13 microcompartment also is present on other organisms.

[0040] FIG. 15A shows the microcompartment gene cluster found in Group 14 proxy organism, Desulfovibrio desulfuricans G20. FIG. 15B shows the Group 14 microcompartment also is present on other organisms.

[0041] FIG. 16A shows the microcompartment gene cluster found in Group 15 proxy organism, Alkaliphilus metalliredigens QYMF. FIG. 16B shows the Group 15 microcompartment also is present on other organisms.

[0042] FIG. 17A shows the microcompartment gene cluster found in Group 16 proxy organism, Alkaliphilus metalliredigens QYMF. FIG. 17B shows the Group 16 microcompartment also is present on other organisms.

[0043] FIG. 18 shows the microcompartment gene cluster found in Group 17 proxy organism, Leptotrichia buccallis.

[0044] FIG. 19A shows the microcompartment gene cluster found in Group 18 proxy organism, Salmonella typhimurium LT2. FIG. 19B shows the Group 18 microcompartment also is present on other organisms.

[0045] FIG. 20A shows the microcompartment gene cluster found in Group 19 proxy organism, Salmonella typhimurium LT2. FIG. 20B shows the Group 19 microcompartment also is present on other organisms.

[0046] FIG. 21 shows the microcompartment gene cluster found in Group 20 proxy organism, Clostridium kluveryi.

[0047] FIG. 22 shows the microcompartment gene cluster found in Group 21 proxy organism, Bacteroides capillosus.

[0048] FIG. 23 shows the microcompartment gene cluster found in Group 22 proxy organism, Opitutus terrae PB90-1.

[0049] FIG. 24 shows the microcompartment gene cluster found in Group 23 proxy organism, Chloroherpeton thalassium ATCC 35110.

[0050] FIG. 25 shows the microcompartment gene cluster found in Group 24A proxy organism, Thiomicrospira crunogena XCL-2.

[0051] FIG. 26 shows the microcompartment gene cluster found in Group 24B proxy organism, Prochlorococcus marinus MIT 9313.

### DETAILED DESCRIPTION OF THE PREFERRED EMBODIMENT

### Introduction

[0052] Carboxysome-like compartments (bacterial microcompartments) are currently found to be widespread in bacteria for various metabolic functions—many unknown.

[0053] The prototypical bacterial microcompartment is the carboxysome, a bacterial polyhedral organelle which increases the efficiency of CO₂ fixation by encapsulating RuBisCO and carbonic anhydrase and other proteins. Carboxysomes can be divided into two types: alpha-type carboxysomes and beta-type carboxysomes (FIGS. 13, 25, 26). In addition to carboxysomes there are other experimentally characterized bacterial microcompartments that contain shell proteins homologous to those in the carboxysome; these include pdu bacterial microcompartments (FIG. 19A,B) involved in coenzyme B12-dependent degradation of 1,2-propanediol and eut bacterial microcompartments (FIG. 20A, B) involved in the cobalamin-dependent degradation of ethanolamine. Structural evidence shows that several carboxysome shell proteins and their homologs (e.g. Csos1A, D CcmK1,2,4, and PduU, EutL; collectively members of Pfam00936) exist as hexamers or pseudohexamers which might further assemble into extended, tightly packed layers hypothesized to represent the flat facets of the polyhedral organelles outer shell. It has been suggested that other homologous proteins in this family might also form hexamers and play similar functional roles in the construction of their corresponding organelle outer shell.

[0054] EutN_CcmL: Ethanolamine utilisation protein and carboxysome structural protein domain family (collectively, members of Pfam03319). Beside the Escherichia coli ethanolamine utilization protein EutN and the Synechocystis sp. carboxysome (beta-type) structural protein CcmL, this family also includes alpha-type carboxysome structural proteins CsoS4A and CsoS4B (previously known as OrfA and OrfB), propanediol utilization protein PduN, and some hypothetical homologous of various bacterial microcompartments. It is interesting that both carboxysome structural proteins CcmL and CsoS4A assemble as pentamers in the crystal structures, which might constitute the twelve pentameric vertices of a regular icosahedral carboxysome or otherwise introduce curvature into a micrompartment shell. However, the reported EutN structure is hexameric rather than pentameric. The absence of pentamers in Eut microcompartments might lead to less-regular icosahedral shell shapes. Due to the lack of structure evidence, the functional roles of the CsoS4A adjacent paralog, CsoS4B, and propanediol utilization protein PduN are not yet clear.

[0055] With these observations in mind and while cataloging/characterizing all bacterial microcompartment components, it was realized that these microcompartment components can be combined in novel ways or used as protein scaffolds to engineer new or enhanced active site capabilities thereby generating customized catalysis in a module,

[0056] For example, by encapsulating the enzymes necessary for this process within a protein shell, the propanediol utilization (pdu) microcompartment presumably protects the cell from propionaldehyde, a toxic intermediate. Likewise, microcompartments are formed in some enteric bacteria (including Salmonalla enterica and E. coli) when grown in the presence of ethanolamine. The ethanolamine utilization (eut) microcompartment is thought to sequester acetaldehyde, an intermediate in the degradation of ethanolamine, and might serve to either protect cells from the toxic effects of acetylaldehyde or to help retain this volatile intermediate, thereby preventing the loss of fixed carbon. The microcompartments that are formed during growth on 1,2-propanediol or ethanolamine seem to be less uniform in size and more irregular geometrically than carboxysome microcompartments, but it seems likely that they are constructed according to similar architectural principles, based on the homology between components of their shells. Two reviews written by one of the authors describes such interest in carboxysome compartments in Yeates, T. O., Kerfeld, C. A., Heinhorst, S., Cannon, G. C. and Shively, J. Protein-Based Organelles in Bacteria: Carboxysomes and Related Microcompartments. Nat. Rev Microbiol. 2008 September; 6(9):681-91. Review, online on Aug. 4, 2008, and Kerfeld, C. A., Heinhorst, S. and Cannon, G. C. Bacterial Microcompartments. Annual Review of Microbiology, in press both of which are hereby incorporated by reference.

[0057] The pdu microcompartment and its numerous proteins and enzymes have been functionally characterized (FIG. 1D, FIG. 2B) by others in Bobik, T. A. Polyhedral organelles compartmenting bacterial metabolic processes. Appl. Microbiol. Biotechnol. 70, 517-525 (2006) and Havemann, G. D. & Bobik, T. A. Protein content of polyhedral organelles involved in coenzyme B12-dependent degradation of 1,2-propanediol in Salmonella enterica serovar Typhimurium LT2. J. Bacteriol. 185, 5086-5095 (2003). Purified and characterized the Pdu microcompartment, hereby incorporated by reference. Interestingly, the models for operation of the pdu microcompartment require movement of bulky molecules such as ATP and B₁₂ cofactors across the shell, raising further questions about molecular transport.

[0058] By taking naturally occurring components of bacterial microcompartments and modifying (e.g. altering active sites—essentially using the known encapsulated protein as a scaffold) and/or recombining them one can design new or enhanced bacterial microcompartments. These can be transferred among organisms (bacteria, plants, algae) using basic molecular techniques, followed by adaptive evolution to optimize phenotype. Alternatively, the modules are stable in solution or can be engineered to be (via reversible bonds/crosslinks) stable in solution, thus carrying out catalysis in cell free, non biological systems.

[0059] In another embodiment, one can engineer new metabolic modules (essentially organelles of specific function) into bacteria and thereby providing a new approach to designing and optimizing catalysis in solution. This is a way of bringing groups of enzymes that are functionally related into an organism or into solution. By delivering the enzymes encapsulated in the module, it is possible to introduce new functions that might otherwise be toxic to the cell, or incompatible with other aspects of cellular metabolism. Based on the design principles of naturally occurring metabolic modules, the naturally occurring assemblies of interior components and shell, we will be able to deliver groups of enzymes that are already (partially) optimized with respect to intermolecular interactions.

[0060] The present methods allow one to add new metabolic capabilities to bacteria, plants and algae, to carry out cell-free catalysis in solution that can be controlled by manipulating the microcompartment structure and organization (e.g. disassociating the catalytic microcompartment after catalytic reaction has reached a desired endpoint), and the enhancement of existing potentials of bacteria, plants and algae (e.g., increase RuBisCO activity in photosynthetic eukaryotes by adding microcompartment shell genes).

[0061] This could be used for any application in which bacteria play a role, including but not limited to, biomass conversion, bioreactors. One could use this to enhance the core metabolism of the bacterium (to make it grow better) or to introduce new functions (such as the production of 3-HPA or additional acetyl CoA) to an organism to increase its repertoire of functions

### DEFINITIONS

[0062] The term “bacterial microcompartment” as used herein is intended to describe and include genes with sequence or structural homology to the conserved bacterial microcompartment domains pfam00936 and/or pfam03319 along with any other genes that are associated or identifiable as in a gene cluster with these pfam00936 and/or pfam03319 homologs or are implicated microcompartment proteins by co-regulation with microcompartment genes and may encode proteins and/or enzymes having metabolizing activity. The term “gene cluster” or “cluster” or “cluster or genes” as used herein is intended to describe and include genes which are contiguous and generally not separated by more than about 300 bp from one another, but may include some genes which are distal in a genome but co-regulated or co-expressed with the genes found in the gene cluster. While many of the bacterial microcompartments are found in contiguous gene clusters, it is recognized that there may be multiple clusters within a genome, or alternatively, or in addition, many organisms that have gene clusters will also have scattered isolated genes that may also be co-regulated and can be incorporated into the bacterial microcompartment. The scattered genes may have been more recently acquired as it may be that once a bacteria acquires a BMC gene cluster, it can readily pick up and retain genes that could be co-expressed in the microcompartment although the gene may physically reside elsewhere in the genome.

[0063] In one embodiment, the cluster of genes containing one or more occurrences of Pfam00936 and/or Pfam03319 wherein all contiguous genes are not greater than about 300 bp from one another or are distal in the genome (including in plasmids), but co-regulated/expressed with bacterial microcompartment genes. Thus, in another embodiment, an expression cassette comprising a nucleic acid molecule comprising a cluster of bacterial compartment genes.

[0064] As used herein, the term, “host cell,” refers to any cell that can be transformed by foreign DNA where the foreign DNA may be a plasmid or vector containing a gene and the gene can be expressed in the cell. The host cell can be a cell from an organism, for example, microbial, including bacterial, fungal, and viral, plant, animal, or mammalian.

[0065] As used herein, the term, “library,” “clone library” or “genomic library” refers to a set of clones containing DNA fragments randomly generated by fragmentation of a genome or large DNA fragment, inserted into a suitable plasmid vector and cloned into a suitable host organism, such as E. coli. Sequencing of clones in a library involves carrying out sequence reactions to sequence the beginning and the end of the DNA fragment inserted into each sequenced clone, also referred to as “end sequences”, or “reads”. The genome or large DNA fragments may be from any eukaryote, including human, mammal, plant or fungus, or prokaryote, including bacteria, virus or archaea.

[0066] As used herein, the term “toxic” when used to define a gene, refers to a gene whose expression product inhibits the growth of microorganisms, such as bacteria and archaea. For example, a toxic gene can be a gene which when expressed in a host cell, causes the host cell to become nonviable or causes cell death, and is thus “toxic” to the cell.

[0067] As used herein, the term “nucleic acid” includes reference to a deoxyribonucleotide or ribonucleotide polymer in either single- or double-stranded form, and unless otherwise limited, encompasses known analogues (e.g., peptide nucleic acids) having the essential nature of natural nucleotides in that they hybridize to single-stranded nucleic acids in a manner similar to naturally occurring nucleotides.

[0068] As used herein, the terms “polypeptide” and “protein” and in some instances “enzyme(s)” are used interchangeably and are intended to refer to a polymer of amino acid residues. The terms apply to amino acid polymers in which one or more amino acid residues is an artificial chemical analogue of a corresponding naturally occurring amino acid, as well as to naturally occurring amino acid polymers. Polypeptides of the invention can be produced either from a nucleic acid disclosed herein, or by the use of standard molecular biology techniques. For example, a truncated protein of the invention can be produced by expression of a recombinant nucleic acid of the invention in an appropriate host cell, or alternatively by a combination of ex vivo procedures, such as protease digestion and purification, or in-vitro peptide synthesis. When referring to an enzyme, generally they are proteins having or exhibiting some metabolizing or catalytic activity.

[0069] As used herein, “variants” is intended to mean substantially similar sequences. For polynucleotides, a variant comprises a deletion and/or addition of one or more nucleotides at one or more internal sites within the native polynucleotide and/or a substitution of one or more nucleotides at one or more sites in the native polynucleotide. As used herein, a “native” polynucleotide or polypeptide comprises a naturally occurring nucleotide sequence or amino acid sequence, respectively. One of skill in the art will recognize that variants of the nucleic acids of the invention will be constructed such that the open reading frame is maintained. For polynucleotides, conservative variants include those sequences that, because of the degeneracy of the genetic code, encode the amino acid sequence of one of the microcompartment, shell proteins, proteins or enzyme polypeptides of the invention. Naturally occurring allelic variants such as these can be identified with the use of well-known molecular biology techniques, as, for example, with polymerase chain reaction (PCR) and hybridization techniques as outlined below. Variant polynucleotides also include synthetically derived polynucleotide, such as those generated, for example, by using site-directed mutagenesis but which still encode an microcompartment protein of the invention. Generally, variants of a particular polynucleotide of the invention will have at least about 30$, 35%, 40%, 45%, 50%, 55%, 60%, 65%, 70%, 75%, 80%, 85%, 90%, 91%, 92%, 93%, 94%, 95%, 96%, 97%, 98%, 99% or more sequence identity to that particular polynucleotide as determined by sequence alignment programs.

[0070] Variants of a particular polynucleotide of the invention (i.e., the reference polynucleotide) can also be evaluated by comparison of the percent sequence identity between the polypeptide encoded by a variant polynucleotide and the polypeptide encoded by the reference polynucleotide. Percent sequence identity between any two polypeptides can be calculated using sequence alignment programs. Where any given pair of polynucleotides of the invention is evaluated by comparison of the percent sequence identity shared by the two polypeptides they encode, the percent sequence identity between the two encoded polypeptides is at least about 30%, 35%, 40%, 45%, 50%, 55%, 60%, 65%, 70%, 75%, 80%, 85%, 90%, 91%, 92%, 93%, 94%, 95%, 96%, 97%, 98%, 99% or more sequence identity.

[0071] “Variant” protein is intended to mean a protein derived from the native protein by deletion or addition of one or more amino acids at one or more internal sites in the native protein and/or substitution of one or more amino acids at one or more sites in the native protein. Variant proteins encompassed by the present invention are biologically active, that is they continue to possess the desired biological activity of the native protein, that is, microcompartment activity as described herein. Such variants may result from, for example, genetic polymorphism or from human manipulation. Biologically active variants of a native microcompartment protein of the invention will have at least about 30%, 35%, 40%, 45%, 50%, 55%, 60%, 65%, 70%, 75%, 80%, 85%, more preferably 90%, 91%, 92%, 93%, 94%, 95%, 96%, 97%, 98%, 99% or more sequence identity to the amino acid sequence for the native protein as determined by sequence alignment programs. A biologically active variant of a protein of the invention may differ from that protein by as few as 1-15 amino acid residues, as few as 1-10, such as 6-10, as few as 5, as few as 4, 3, 2, or even 1 amino acid residue.

[0072] As used herein, a gene is said to have homology if there is at least about 30%, 35%, 40%, 45%, 50%, 55%, 60%, 65%, 70%, 75%, 80%, 85%, more preferably 90%, 91%, 92%, 93%, 94%, 95%, 96%, 97%, 98%, 99% or more sequence identity to the amino acid sequence for the native protein as determined by sequence alignment programs (such as BLAST) or if there is structural similarity as determined by three-dimensional structural superposition algorithms such as SUPERPOSE or superposition applications in PYMOL.

[0073] The proteins of the invention may be altered in various ways including amino acid substitutions, deletions, truncations, and insertions. Methods for such manipulations are generally known in the art. For example, amino acid sequence variants and fragments of the microcompartment proteins can be prepared by mutations in the DNA. Methods for mutagenesis and polynucleotide alterations are well known in the art. See, for example, Kunkel (1985) Proc. Natl. Acad. Sci. USA 82:488-492; Kunkel et al. (1987) Methods in Enzymol. 154:367-382; U.S. Pat. No. 4,873,192; Walker and Gaastra, eds. (1983) Techniques in Molecular Biology (MacMillan Publishing Company, New York) and the references cited therein. Guidance as to appropriate amino acid substitutions that do not affect biological activity of the protein of interest may be found in the model of Dayhoff et al. (1978) Atlas of Protein Sequence and Structure (Natl. Biomed. Res. Found., Washington, D.C.), herein incorporated by reference. Conservative substitutions, such as exchanging one amino acid with another having similar properties, may be optimal.

[0074] Thus, the genes and polynucleotides of the invention include both the naturally occurring sequences and their variants as well as mutant forms. Likewise, the proteins of the invention encompass naturally occurring proteins as well as variations and modified forms thereof. Such variants will continue to possess the desired microcompartment activity.

[0075] In nature, some polypeptides are produced as complex precursors which, in addition to targeting labels such as the signal peptides for example in chloroplasts, also contain other fragments of peptides which are removed (processed) at some point during protein maturation, resulting in a mature form of the polypeptide that is different from the primary translation product (aside from the removal of the signal peptide). “Mature protein” refers to a post-translationally processed polypeptide; i.e., one from which any pre- or propeptides present in the primary translation product have been removed. “Precursor protein” or “prepropeptide” or “preproprotein” all refer to the primary product of translation of mRNA; i.e., with pre- and propeptides still present. Pre- and propeptides may include, but are not limited to, intracellular or extracellular localization signals. “Pre” in this nomenclature generally refers to the signal peptide. The form of the translation product with only the signal peptide removed but no further processing yet is called a “propeptide” or “proprotein.” The fragments or segments to be removed may themselves also be referred to as “propeptides.” A proprotein or propeptide thus has had the signal peptide removed, but contains propeptides (here referring to propeptide segments) and the portions that will make up the mature protein. The skilled artisan is able to determine, depending on the species in which the proteins are being expressed and the desired intracellular location, if higher expression levels or higher microcompartment activity might be obtained by using a gene construct encoding just the mature form of the protein, the mature form with a signal peptide, or the proprotein (i.e., a form including propeptides) with a signal peptide. For optimal expression in plants or fungi, the pre- and propeptide sequences may be needed. The propeptide segments may play a role in aiding correct peptide folding.

[0076] As used herein in the specification and in the claims section that follows, the phrase “photosynthetic organism” includes organisms, both unicellular or multicellular, both prokaryotes or eukaryotes, both soil grown or aquatic, capable of producing complex organic materials, especially carbohydrates, from carbon dioxide using light as the source of energy and with the aid of chlorophyll and optionally associated pigment.

[0077] The method according to the present invention is effected by transforming cells of an organism with an expressible polynucleotide encoding a polypeptide encoding a bacterial microcompartment and in some embodiments, having a bicarbonate (HCO₃″) transporter activity.

[0078] As used herein in the specification and in the claims section that to follows, the term “transform” and its conjugations such as transformation, transforming and transformed, all relate to the process of introducing heterologous nucleic acid sequences into a cell or an organism. The term thus reads on, for example, “genetically modified”, “transgenic” and “transfected” or “viral infected” and their conjugations, which may be used herein to further described the present invention. The term relates both to introduction of a heterologous nucleic acid sequence into the genome of an organism and/or into the genome of a nucleic acid containing organelle thereof, such as into a genome of chloroplast or a mitochondrion.

[0079] As used herein in the specification and in the claims section that follows, the phrase “expressible polynucleotide” refers to a nucleic acid sequence including a promoter sequence and a downstream polypeptide encoding sequence, the promoter sequence is so positioned and constructed so as to direct transcription of the downstream polypeptide encoding sequence.

[0080] As used herein in the specification and in the claims section that follows, the term “polypeptide” refers also to a protein, in particular a transmembrane protein, which may include a transit peptide, and further to a post translationally modified protein, such as, but not limited to, a phosphorylated protein, glycosylated protein, ubiquitinylated protein, acetylated protein, methylated protein, etc.

[0081] As used herein in the specification and in the claims section that follows, the phrase “bicarbonate transporter activity” refers to the direct activity of a membrane integrated protein in transporting bicarbonate across a membrane in which it is integrated. Such a membrane can be the cell membrane and/or a membrane of an organelle, such as the chloroplast's outer and inner membrane. Such activity can be effected by direct expenditure of energy, i.e., ATP hydrolysis, which is available both in the cytoplasm and the chloroplast's stroma, or by co- or anti-transport, as effected by co- or antiporters while dissipating a concentration gradient of an ion across a membrane.

[0082] According to another aspect of the present invention there is provided a nucleic acid molecule for enhancing inorganic carbon fixation by a photosynthetic organism. The nucleic acid molecule according to this aspect of the present invention includes a polynucleotide encoding a polypeptide having a bicarbonate transporter activity.

[0083] As used herein in the specification and in the claims section that follows, the term “nucleic acid molecule” includes polynucleotides, constructs and vectors. The terms “construct” and “vector” may be used herein interchangeably.

### Selecting Bacterial Microcompartment Sequences and Groups

[0084] In one embodiment, a bacterial microcompartment catalog comprising a total of 1268 gene sequences encoding bacterial microcompartments, the proteins of each can be inserted into a host organism and if needed, expressed using an inducible expression system. The Sequence Listing attached and herein incorporated by reference shows the gene number, internal reference number and the corresponding sequence identifier for the nucleotide and protein sequences, along with the either GenBank Accession Number of each gene, or the GenBank Conserved Domain Number as noted in Table 3, wherein the contents and identities of the GenBank entry are incorporated by reference at the time of filing.

[0085] In another embodiment, a bacterial microcompartment catalog is provided in the Sequence Listing and the Figures. The entire catalog comprising 634 gene sequences encoding bacterial microcompartments, the proteins of each can be inserted into a host organism and if needed, expressed using an inducible expression system.

[0086] FIG. 1 and Table 1 shows the index of the catalog which is comprised of 32 main groups and subgroups of microcompartment clusters and organized by microcompartment function and proxy organism. Examples of proxy organisms include Mycobacterium smegmatis str. MC2 155, Ruminococcus obeum ATCC 29174, Alkaliphilus metalliredigens QYMF, E. coli CFT073, Rhodopseudomonas palustris B is B18, Shewanella putrefaciens CN-32, E. coli UTI89, Desulfatibacillum alkenivorans AK-01, Blastopirellula marina DSM 3645, Methylibium petroleiphilum, Haliangium ochraceum SMP-2, Anabaena variabalis, Trichodesmium erythraeum, Desulfotalea psychrophila LSv54, Desulfovibrio desulfuricans G20, Alkaliphilus metalliredigens QYMF, Sebaldella termatidis and Leptotrichia buccallis, Salmonella typhimurium LT2.

TABLE 1
Index of BMC catalog

| | SEQ ID | | |
|---|---|---|---|
| Group | NOS: | Function | Proxy Organism: |
| Group 1 | 1-20 | | Mycobacterium smegmatis |
| | | | str. MC2 155 |
| Group 1A | 21-44 | | Verminephrobacter eiseniae |
| | | | EF01-2 |
| Group 1B | 45-68 | | Rhodococcus sp. RHA1 |
| | | | plasmid pRHL2 |
| Group 2 | 69-98 | | Ruminococcus obeum |
| | | | ATCC 29174 |
| Group 3 | 99-146 | | Alkaliphilus metalliredigens |
| | | | QYMF |
| Group 3A | 147-176 | | Carboxydothermus |
| | | | hydrogenoformans Z-2901 |
| Group 4 | 177-234 | | E. coli CFT073 |
| Group 5 | 235-270 | | Rhodopseudomonas palustris |
| | | | BisB18 |
| Group 5A | 271-296 | | Clostridium novyi NT |
| Group 6 | 297-342 | | Shewanella putrefaciens |
| | | | CN-32 |
| Group 7 | 343-386 | | E. coli UTI89 |
| Group 8 | 387-436 | | Desulfatibacillum |
| | | | alkenivorans AK-01 |
| Group 8A | 437-482 | | Clostridium kluyveri |
| | | | DSM 555 |
| Group 8B | 483-534 | | Dethiosulfovibrio |
| | | | peptidovorans SEBR 4207, |
| | | | DSM 11002 |
| Group 9 | 535-560 | | Blastopirellula marina |
| | | | DSM 3645 |
| Group 10 | 561-608 | | Methylibium petroleiphilum |
| Group 11 | 609-634 | | Haliangium ochraceum |
| | | | SMP-2 |
| Group 12 | 635-652, | Beta | Anabaena variabalis |
| | 1251-1260 | carboxysome- | |
| Group 12A | 653-668, | Beta | Trichodesmium erythraeum |
| | 1261-1268 | carboxsyome- | |
| Group 13 | 669-714 | | Desulfotalea psychrophila |
| | | | LSv54 |
| Group 14 | 715-772 | | Desulfovibrio desulfuricans |
| | | | G20 |
| Group 15 | 773-814 | | Alkaliphilus metalliredigens |
| | | | QYMF |
| Group 16 | 815-860 | | Alkaliphilus metalliredigens |
| | | | QYMF |
| Group 17 | | | Sebaldella termatidis and |
| | 1055-1098 | | Leptotrichia buccallis |
| Group 18 | 861-902 | propanediol | Salmonella typhimurium |
| | | met.- | LT2 |
| Group 19 | 903-936- | ethanolamine | Salmonella typhimurium |
| | | met- | LT2 |
| Group 20 | 995-1054 | ethanol ut/ | Clostridium kluveryi |
| | | diodehy | |
| Group 21 | 1099-1196 | ethanolamine | Bacteroides capillosus |
| | | var. | |
| Group 22 | 1197-1232 | | Opitutus terrae PB90-1 |
| Group 23 | 1233-1250 | | Chloroherpeton thalassium |
| | | | ATCC 35110 |
| Group 24A | 937-970 | CO2 fixation | Thiomicrospira crunogena |
| | | | XCL-2 |
| Group 24B | 971-994 | CO2 fixation | Prochlorococcus marinus |
| | | | MIT 9313 |

[0087] FIGS. 2A, 3A, 4A, etc to 26A and also 13C show the legend and assign a color and shape for each enzyme or protein that comprises or has activity within a compartment in the Group proxy organism. FIGS. 2B, 3B, 4B, etc. to 20B and also 13D show the Group microcompartment cluster as observed in various other organisms.

[0088] For example, as seen in FIG. 13C, the Group 12A cluster of genes encodes a beta-carboxysome and comprised of the following genes: PF00936 258aa, CcmN 304aa, Protein tyrosine phosphatase (COG0394), CcmM 672aa, PF03319 100aa [RGSA pore], PF00936 112aa [KIGS pore], and PF00936 103aa [KIGS pore]. In another embodiment, elsewhere on the chromosome, further comprising genes encoding the large (Pfam00016/02788) and small (Pfam00101) subunits of RuBisCO, the RuBisCO chaperone, RbcX (Pfam02341) and additional shell (Pfam00936) proteins, which are components of assembly and structure of the carboxysome. The proxy organism is Trichodesmium erythraeum, but this compartment is also found in various other organisms as shown in FIG. 13D, in various forms.

[0089] Table 2 extends the information shown in Table 1 and shows the Group, Figure Number(s), SEQ ID Numbers, Representative organism, Potentially encapsulated reactions, Organism phenotypes, Enzymes (proposed from annotation), Proposed Reason for Encapsulation, and Additional Notes for a majority of the Groups shown in Table 1. Some of the Groups are combined where it may be that there is similar function or metabolizing activity provided by the microcompartment cluster of some Groups.

[0090] Thus, as shown in the Examples, in one embodiment, a custom metabolic microcompartment can be designed using the Groups and clusters of genes in the catalog presented herein to transform an organism or plant. Depending on what the level and type of activity and output is required in a transformed organism, one can provide the microcompartment shell proteins and interchangeably insert into the cluster any number of other enzymes and proteins from the catalog, to produce an expression cassette, which can then be used to transform an organism and thereby providing or enhancing custom metabolic activity.

[0091] In another embodiment, the expression cassette comprising the set of sequences comprising one of the Groups of genes as listed in Table 1. In one embodiment, the Groups of sequences are the following groups of sequences: SEQ ID NOS: 1-20, 21-44, 45-68, 69-98, 99-146, 147-176, 177-234, 235-270, 271-296, 297-342, 343-386, 387-436, 437-482, 483-534, 535-560, 561-608, 609-634, 635-652 and 1251-1260, 653-668 and 1261-1268, 669-714, 715-772, 773-814, 815-860, 1055-1098, 861-902, 903-936-, 937-970, 971-994, 995-1054, 1099-1196, 1197-1232, or 1233-1250.

[0092] Each of the 32 Groups of genes as listed in Table 1 (including the subgroups) is comprised of a cluster of genes, and the order of the genes in that cluster are found in other organisms. The Groups and the order and the sequences of the genes found in the cluster for each Group is as follows in Table 3. The functions are computationally-derived annotations. The direction of transcription is indicated in the corresponding Figure:

TABLE 3
Microcompartment Gene Cluster Groups
Group 1 (FIG. 2)
Aminotransferase (EC:2.6.1.-, PF00202, COG4992)-SEQ 1, 2
PduP/EutE NAD-dependent aldehyde dehydrogenase (PF00171, COG1012)-SEQ 3, 4
PF00936 201aa -SEQ 5, 6
Conserved hypothetical 01a--SEQ 7, 8
PF03319 84aa [QGSV pore]--SEQ 9, 10
PF00936 93aa [QVDG/EVDG pore]-SEQ 11, 12
Conserved hypothetical 01b-SEQ 13, 14
Aminoglycoside phosphotransferase (EC:5.4.2.1, PF01636)-SEQ 15, 16
Short-chain dehydrogenase/reductase (EC:1.1.1.100, PF00106)-SEQ 17, 18
Transcriptional regulator GntR family (PF00392/07702)-SEQ 19, 20
Group 2 (FIG. 3)
Pyruvate formate-lyase (PF01228/02901, COG1882) SEQ 69, 70
Pyruvate-formate lyase-activating enzyme (COG1180) SEQ 71, 72
L-fuculose phosphate aldolase (PF00596, COG0235) SEQ 73, 74
NAD-dependent aldehyde dehydrogenase (PF00171, COG1012), SEQ 75, 76
Threonine/Zn-dependent dehydrogenase dehydrogenases (PF00107/08240, SEQ 77, 78
PF00936 92aa SEQ 79, 80
PF00936 105aa SEQ 81, 82
PF00936 98aa SEQ 83, 84
PF00936 104aa SEQ 85, 86
Propanediol utilization protein (PF06130, COG4869) SEQ 87, 88
PF00936 88aa SEQ 89, 90
Electron transport complex protein RnfC (PF01512, COG4656) SEQ 91, 92
PF00936 182aa SEQ 93, 94
ABC-type cobalamin Fe3+-siderophores transport system (PF00455/08820/08279, COG1349)
SEQ 95, 96
Fe-containing alcohol dehydrogenase (PF00465, COG1454) SEQ 97, 98
Group 3 (FIG. 4)
Glutamate formiminotransferase (EC:2.1.2.5, PF07387/02971) SEQ 99, 100
Formate-tetrahydrofolate ligase (EC:6.3.4.3, PF01268) SEQ 101, 102
Allantoinase, dihydropyrimidinase (EC:3.5.2.2, PF01979, COG0044) SEQ 103, 104
Isochorismatase hydrolase (EC:3.5.1.19 PF00857, COG1335) SEQ 105, 106
3-octaprenyl-4-hydroxybenoate carboxylase (EC:4.1.1.-, PF02441) SEQ 107, 108
3-polyprenyl-4-hydroxybenoate decarboxylase (EC:4.1.1.-, PF01977) SEQ 109, 110
PF00936 91aa [YVGS pore] SEQ 111, 112
Hypothetical protein 3c SEQ 113, 114
PF00936 125aa SEQ 115, 116
PF00936 91aa [KIGF pore] SEQ 117, 118
Hypothetical protein 3b SEQ 119, 120
PF03319 90/96aa [RGTA/MGTA por] SEQ 121, 122
Adenine deaminase (EC:3.5.4.2, COG1001) SEQ 123, 124
Xant/ur/vit C permease (PF00860 SEQ 125, 126
Amidohydrolase (EC:3.5.4.2, PF01979, COG0402) SEQ 127, 128
Molybdopterin dehydrogenase (EC:1.2.99.2, PF00941) - SEQ 129, 130
2Fe-2S feRdoxin (PF01799/00111, COG2080) SEQ 131, 132
Xanthine dehydrogenase (EC:1.17.1.4, PF01315/02738, COG1529) SEQ 133,
Aldehyde oxidase (EC:1.2.3.1, PF02738, COG1529) SEQ 135, 136
Adenine deaminase (EC:2.5.4.2, PF01979/07968) SEQ 137, 138
Conserved hypothetical protein 3a SEQ 139, 140
Molybdenum cofactor biosynthesis COG2068)SEQ 141, 142
Group 4 (FIG. 5)
Fe-containing alcohol dehydrogenase (PF00465/01761)
PduL (PF06130, COG04869)
PduM/EutJ (COG4820)
Flavoprotein (PF02441)
PF00319 89aa [TGSS pore]
PduO (PF03928, COG3193)
Acetate kinase (EC:2.7.2.1, PF00871, COG0282)
PF00936 93aa [KIGS pore]
PduB/EutL (PF00936, COG4816)
PduP/EutE NAD-dependent aldehyde
Hypothetical protein 04a
Protease/amidase (PF01965, COG0693)
Pyruvate formate lyase (EC:2.3.1.54, PF02901/
PFL-activating (EC:1.97.1.4, PF04055, COG1180)
Conserved hypothetical protein
Putative maturase-related protein 179aa (COG3344)
Putative maturase-related protein 173aa (COG3344)
Hypothetical protein 04b/106aa, 04c/44aa, 04d/62aa
Histidine kinase (EC:2.7.3.-, PF06580/02150, COG3275)
Transcriptional regulator, AraC family(PF00165/00072, COG2207/2204)
Methionine adenosyltransferase (EC:2.5.1.6, PF00438/2772/2773)
PF00936 213/182aa
Superoxide response regulon transcriptional activator (PF00165, COG2207)
Transcriptional regulator, TetR family (PF00440)
Cation/multidrug efflux pump protein (COG0841)
Transposase InsC for insertion (PF01527,
Group 5 (FIG. 6)
Pyruvate formate lyase (EC:2.3.1.54,]-SEQ 269, 270
Fe-containing alcohol dehydrogenase (PF00465)-SEQ 267, 268
2 PF00936 97aa [KIGS pore]--SEQ 263, 264 AND 265, 266
PduB/EutL (PF00936, COG4816)-SEQ 261, 262
PF00936 93aa [KIGS pore]-SEQ 259, 260
PduL (PF06130, COG4869)SEQ 257, 258
PduM/EutJ (COG4820)-SEQ 255, 256
Flavoprotein (PF02441)-SEQ 253, 254
PF03319 89aa [CGSA pore]-SEQ 251, 252
PduO (PF03928, COG3193)-SEQ 249, 250
PduP/EutE NAD-dependent aldehyde dehydrogenase (PF00171)-SEQ 247, 248
Hypothetical protein 99aa (partial PF00936)-SEQ 245, 246
PFL-activating (EC:1.97.1.4, PF04055, COG1180)-SEQ 243, 244
Methionine adenosyltransferase (EC:2.5.1.6, PF00438/02772/02773)-SEQ 241, 242
Histidine kinase (EC:2.7.3.-, PF06580/02518)-SEQ 239, 240
Transcriptional regulator, AraC family (PF00072/00165, COG4753) SEQ 237, 238
Acetate kinase (EC:2.7.2.1, PF00871, COG0282)--SEQ 235, 236
Group 6 (FIG. 7)
Transposase Ins1 (PF03811, COG03677)
Transposase IS4 (PF01609)
PTS system, mannose/fructose/sorbose IIB subunit (PF03830)
PTS system, mannose/fructose/sorbose IIC subunit (PF03609)
PTS system, mannose/fructose/sorbose IID subunit (PF03613)
PF00936 100aa [KIGS pore]
PduB/EutL (PF00936, COG4816)
Pyruvate formate lyase (EC:2.3.1.54, PF02901/01228, COG1882)
PFL-activating (EC:1.97.1.4, PF00037/04055, COG1180)
PduF (PF00230, COG0580)
PF00936 96aa [KIGS pore]
PF00936 288aa
PduL (PF06130, COG4869)
PduM/EutJ (COG4820)
PF03319 92aa [RGSS pore]
PduO (PF03928, COG3193)
PduP/EutE NAD-dependent aldehyde dehydrogenase (PF00171)
Fe-containing alcohol dehydrogenase (PF00465/01761)
Transposase IS204/IS1001/IS1096/IS1165 (PF01610)
Lipoprotein signal peptidase (EC:3.4.23.36, PF01252, COG0597)
Cation efflux system permease (COG1230)
Transcriptional regulator, MerR family (PF00376/01381/07883)
Group 7 (FIG. 8)
Transposase IS3 (PF01527)
Integrase, catalytic region (PF00665)
Transcriptional regulator, TetR family(PF00440)
Transcriptional regulator, C-terminal (PF00486)
Hypothetical protein 07a
Hypothetical protein 07b
PF00936 92aa [NIGS pore]
PF00936 94aa [NIGS pore]
PF00936 92aa [NIGS pore]
PduP/EutE NAD-dependent aldehyde Dehydrogenase (PF00171)
PF03319 85aa [EYFA pore]
Fe-containing alcohol dehydrogenase PF00465/01761
Pyruvate formate lyase (EC:2.3.1.54, PF02901/01228, COG1882)
PFL-activating (EC:1.97.1.4, PF0037/04055, COG1180)
PF00936 150aa
PduL (PF06130, COG4869)
Hypothetical protein 07c
Multi-drug resistance protein (FP00893, COG2076)
Multi-drug resistance protein (FP00893, COG2076)
D-serine deaminase activator (PF00126/03466)
H+/gluconate symporter, GntP family(PF02447/03600, COG2610)
D-serine dehydratase (EC:4.3.1.18, PF00291, COG3048)
Group 8 (FIG. 9)
Acetyl-CoA C-acyltransferase (EC:2.3.1.16)
PF00936 93aa [KIGS pore]
PduB/EutL (PF00936, COG4816)
Glycerol dehydratase, large subunit (EC:4.2.1.30, PF02286, COG4909)
Glycerol dehydratase, medium subunit (EC:4.2.1.30, PF02288)
Glycerol dehydratase, small subunit (EC:4.2.1.30, PF02287, COG4910)
Putative glycerol dehydratase large subunit (EC:4.2.1.30, PF08841)
Hypothetical protein 121aa
PF00936 181aa
PduL (PF06130, COG4869)
PduM/EutJ (PF06723, COG4820)
Flavoprotein (PF02441)
ATP:cob(I)alamin adenosyltransferase (EC:2.5.1.17, PF01923/03928)
Protein of unknown function (PF03928)
PduP/EutE NAD-dependent aldehyde dehydrogenase (PF00171)
PduS ferredoxin (PF01512, COG4656)
PF00936 183aa
Hypothetical protein
Butyrate kinase (EC:2.7.2.7, PF00871)
Acetate kinase (EC:2.7.2.1, PF00871)
Fe-containing alcohol dehydrogenase (PF00465)
ATPase-like protein
Hypothetical protein
Membrane protein (PF04020)
Transcriptional regulator, TetR family (PF00440)
Group 9 (FIG. 10)
Malate dehydrogenase (EC:1.1.1.37, PF00056/02866, COG0039)-559, 560
L-fuculose-phosphate aldolase (EC:4.1.2.17, PF00596, COG0235)-SEQ 557, 558
PF03319 96/101/93aa [EGGE/EGPE/EGAE pore]-SEQ 555, 556
Hypothetical protein 09a 222aa-SEQ 553, 554
PF00319 86/95/86aa [SDGE/SETG/SDGA pore]-SEQ 551, 552
Aldehyde dehydrogenase (EC:1.2.1.10, PF00171, COG1012)-SEQ 549, 550
PF03319 146/130/85aa [QGSS/QGSS/SDGA pore]-SEQ 547, 548
Hypothetical protein 09b 44aa-SEQ 545, 546
Acetate kinase (EC:2.7.2.1, PF00871, COG0282)-SEQ 543, 544
PF00936 100aa [NIGG/KIGA/QIGG pore]-SEQ 541, 542
PF00936 100aa [KVGS/KIGA/KVGS pore]-SEQ 539, 540
PduL (PF06130, COG4869)-SEQ 537, 538
Transcriptional regulator, DeoR family (PF08220/00455, COG1349)-SEQ 535, 536
Group 10 (FIG. 11)
Sugar diacid utilization regulator (PF01590, COG3835)
Zn-containing alcohol dehydrogenase (PF08240/00107, COG1063)
Malate dehydrogenase (EC:1.1.1.37, PF00056/02866, COG0039)
PF00936 205aa
PduM/EutJ (PF06723, COG4820)
PduP/EutE NAD-dependent aldehyde dehydrogenase (PF00171)
PF00936 105aa [QIGG pore]
PF03319 103aa [LGSA pore]
Hypothetical protein 10a 332aa
Phosphatase-like protein (EC:3.1.3.18, PF00702)
Hypothetical protein 10b 104aa
Pyruvate phosphate dikinase (EC:2.7.9.1, PF01326/00391, COG0574)
PF00936 100aa [QPGG pore]
Hypothetical protein 10c 223aa
TonB-dependent outer membrane cobalamin receptor (PF07715/00593)
Cobrinic acid a,c-diamide synthase (EC:6.3.5.9, PF01656/07685)
Adenosyl cobinamide kinase (EC:2.7.1.156, (EC:2.7.1.156, PF02283)
Iron(III) dicitrate-binding protein (PF01497)
Iron ABC transporter, permease protein (EC:3.6.3.33, PF01032)
Iron ABC transporter ATP-binding protein (EC:3.6.3.34, PF00005)
Cob(I)alamin adenosyltransferase (EC:2.5.1.17, PF02572)
Cobalamin biosynthesis (EC:6.3.1.10, PF03186)
Cobyric acid decarboxylase (EC:2.6.1.9, PF00155)
Cobyric acid synthase (EC:6.3.5.10, PF01656/07685)
Group 11 (FIG. 12)
PAS domain S-box (PF00072/00512/00785/00989/02518)
Putative homoserine kinase type II (PF01636)
FKBP-type peptidyl-prolyl cis-trans isomerase (EC:5.2.1.8, PF00254)
Xaa-pro aminopeptidase (EC:3.4.13.9, PF00557)
Serine/threonine-protein kinase (EC:2.7.11.1, PF00069)
PF00936 205aa
PduP/EutE NAD-dependent aldehyde dehydrogenase (PF00171)
PF03319 96aa [SGSS pore]
PF00936 84aa [KTGG pore]
PF00936 212aa
Peptidase C11 (PF03415)
Group 12 (FIG. 13A and 13B)
Transcriptional regulator, LysR family (PF00126/03466)
PF00936 260aa
CcmN 248aa
CcmM (EC:4.2.1.1, PF00101)
PF03319 101aa [VVGA pore]
PF00946 114aa [KIGS pore]
PF00936 114aa [KIGS pore]
NADH dehydrogenase subunit L (EC:1.6.99.5, PF00361)
NADH dehydrogenase subunit M (EC:1.6.99.5, PF00361)
Group 12A (FIG. 13C and 13D)
PF00936 258aa
CcmN 304aa
Protein tyrosine phosphatase (COG0394)
CcmM 672aa
PF03319 100aa [RGSA pore]
PF00946 112aa [KIGS pore]
PF00936 103aa [KIGS pore]
Group 13 (FIG. 14)
Hypothetical protein 13a 87aa
Hypothetical protein 13b 94aa
EutQ (COG4766)
PF00936 92aa [QIGA pore]
PduS ferredoxin (PF01512, COG4656)
PF00936 185aa
PF00936 121aa
PF00936 92aa [RIGG pore]
PF03319 102aa [RGSG pore]
PduP/EutE NAD-dependent aldehyde dehydrogenase (PF00171)
PduM/EutJ (PF06723, COG4820)
Hypothetical protein 13c 74aa
EutQ (Cog4766)
Phosphate acetyltransferase (EC:2.3.1.8, PF01515, COG0280)
PF00936 92aa [RIGG pore]
PduS ferredoxin (PF01512, COG4656)
PF00936 185aa
PF00936 122aa
PF00936 92aa [RIGG pore]
PF03319 102aa [RGSG pore]
NAD-dependent aldehyde dehydrogenase (EC:1.2.1.9, PF00171)
Pyruvate formate lyase (EC:2.3.1.54, PF02901/01228, COG1882)
PFL-activating (EC:1.97.1.4, PF02901/04055, COG1180)
Group 14 (FIG. 15)
PduV/EutP (PF00009, COG4917)
PduU/EutS (PF00936, COG4810)
PF00936 183aa
PduS ferredoxin (PF01512, COG4656)
Fe-containing alcohol dehydrogenase (PF00465)
Hypothetical protein 14a 77aa
Hypothetical protein 14b 44aa
PF00936 92aa [QVGG pore]
Hypothetical protein 14c 116aa
PF00936 182aa
PF03319 91aa [TGSS pore]
Hypothetical protein 14d 197aa
PduM/EutJ (PF06723, COG4820)
PduL (PF06130, COG4869)
Hypothetical protein 14e 78aa
PF00936 94aa [QVGG pore]
PduP/EutE NAD-dependent aldehyde dehydrogenase (PF00171)
PF00936/02037 207aa
PFL-activation (EC:1.97.1.4, PF04055)
Pyruvate formate lyase (EC:2.3.1.54, PF02901/01228, COG1882)
PduP/EutE NAD-dependent aldehyde dehydrogenase (PF00171)
PF00936 208aa
Hypothetical protein 14f 89aa
Hypothetical protein 14g 78aa
Membrane protein (PF00892)
Hypothetical protein 14h 88aa
Hypothetical protein 14i 82aa
Transcriptional regulator MerR family (PF00376)
Group 15 (FIG. 16)
PduU/EutS (PF06132, COG4810)
PduV/EutP (PF00009, COG4917)
Resposne regulator receiver and ANTAR domain (PF00072/03861)
Histidine kinase (PF00989/07568/02518)
EutA ammonia lyase (PF06277)
EutB ammonia lyase heavy chain (EC:4.3.1.7, PF06751)
EutC ammonia lyase light chain (EC:4.3.1.7, PF05985)
PduB/EutL (PF00936/COG4816)
PF00936 173aa
PduP/EutE NAD-dependent aldehyde dehydrogenase (PF00171)
PF00936 94aa [HVGG pore]
EutT cob(I)alamin adenosyltransferase (EC:2.5.1.17, PF01923)
PduL (PF06130, COG4869)
PduM/EutJ (PF06723, COG4820)
Conserved hypothetical protein 254aa
PF03319 94aa [KGNA pore]
PduS ferredoxin (PF00037/01512, COG4656)
PF00936 181aa
EutH (PF04346)
Fe-containing alcohol dehydrogenase (PF00465/01761)
Transcriptional regulator, TetR family (PF00440)
Group 16 (FIG. 17)
PF00936 99aa [QIGA pore]
PduL (PF06130, COG4869)
PduP/EutE NAD-dependent aldehyde dehydrogenase (PF00171)
PF00936 199aa
EutQ (PF05899/06249)
PF00936 182aa
PduS ferredoxin (PF01512, COG4656)
PF03319 87aa [TGSG/TGSS/TGSA pore]
PduB/EutL (PF00936, COG4816)
PduM/EutJ (PF06723, COG4820)
Hypothetical protein 16a 212aa
PduV/EutP (PF00009, COG4917)
PduU/EutS (PF00936, COG4810)
PFL-activating (EC:1.97.1.4, PF04055)
Pyruvate formate lyase (EC:2.3.1.54, PF02901/01228, COG1882)
PF00936 100aa
PF00936 99aa
Hypothetical protein 16b 88aa
Membrane protein (PF00892)
Choline/ethanolamine kinase (PF01093/01633)
Fe-containing alcohol dehydrogenase (PF00465/01761)
Histidine kinase (PF07568/02518)
Transcriptional regulator, AraC family (PF01093/01633)
Group 17 (FIG. 18)
EutQ unknown function (PF05899/06249)
EutH permease (PF04346)
PF00936217aa
EutC ammonia lyase light chain (EC:4.3.1.7, PF05985)
EutB ammonia lyase heavy chain (EC:4.3.1.7, PF06751)
EutA ethanolamine ammonia-lyase reactivase (PF06277)
Histidine kinase (PF07568/02518)
Response regulator receiver and NTAR domain (PF00072/03861)
Fe-containing alcohol dehydrogenase (PF00465)
Hypothetical protein
PF03319 82aa
Hypothetical protein
PduL PF06130
Cobalamin adenonsyl transferase PF01923
PF00171
PF00936 97aa
PF00936 248aa
EutP/PduV unknown function
PF00936 115aa
PF00936 91aa
PF00936 91aa
Aldehyde dehydrogenase PF00171)
PF03928
Hypothetical protein
Diol dehydratase reactivase (PF08841)
B12-dependent diol dehydratase, small subunit (E:4.2.1.30, PF02287)
B12-dependent diol dehydratase, medium subunit (E:4.2.1.30, PF02288)
B12-dependent diol dehydratase, large subunit (E:4.2.1.30, PF02286)
PF00936 231 aa
Group 18 (FIG. 19)
PF00936 94aa [KIGS pore]
PduB/EutL (PF00936, COG4816)
PduC B12-dependent diol dehydratase, large subunit (EC:4.2.1.30, PF08841)
PduC B12-dependent diol dehydratase, medium subunit (EC:4.2.1.30, PF02288)
PduC B12-dependent diol dehydratase, small subunit (EC:4.2.1.30, PF002287)
PduG diol dehydratase reactivase
PduH diol dehydratase reactivase
PF00936 91aa [KIGS pore]
PF00936 160aa
PduL phosphotransacylase (PF06130, COG4869)
PduM/EutJ possible chaperone (PF06723, COG4820)
PF03319 91aa [GGSS pore]
PduO adenosyl transferase (PF01923/03928, COG3193)
PduP/EutE propionaldehyde dehydrogenase (PF00171)
PduQ/EutG propanol dehydrogenase (PF00465)
PduS cobalamin reductase (PF01512 COG4656)
PF00936 184aa
PduU/EutS (PF00936, COG4810)
PduV/EutP (PF00009, COG4917)
PduW acetate kinase (EC:2.7.2.1,
PduX threonine kinase (PF00288/08544)
Group 19 (FIG. 20)
EutS/PduU (PF00936, COG4810) (SEQ ID NOs: 905, 906)
EutP/PduV unknown function (SEQ ID NOs: 907, 908)
EutQ unknown function (PF05899/06249) (SEQ ID NOs: 909, 910)
EutT corrinoid adenosyltransferase, cobalamin recycling (EC:2.5.1.17, PF01923) (SEQ ID
NOs: 911, 912)
EutD phosphotransacetylase (PF01515) (SEQ ID NOs: 913, 914)
EutM (PF00936 96aa [QIGG pore]) (SEQ ID NOs: 915, 916)
EutN (PF03319 99aa [SGSS pore]) (SEQ ID NOs: 917, 918)
EutE/PduP aldehyde dehydrogenase (PF00171) (SEQ ID Nos: 919, 920)
EutJ/PduM possible chaperone (PF06723, COG4820) (SEQ ID Nos : 921, 922)
EutG/PduQ alcohol dehydrogenase (PF00465) (SEQ ID NOs: 923, 924)
EutH permease (PF04346) (SEQ ID NOs: 925, 926)
EutA ethanolamine ammonia-lyase reactivase (PF06277) (SEQ ID NOs: 927, 928)
EutB ammonia lyase heavy chain (EC:4.3.1.7, PF06751) (SEQ ID NOs: 929, 930)
EutC ammonia lyase light chain (EC:4.3.1.7, PF05985) (SEQ ID NOs: 931, 932)
EutL/PduL (PF00936, COG4816) 219aa (SEQ ID NOs: 933, 934)
EutK (PF03319) 164aa (SEQ ID NOs: 935, 936)
EutR transcriptional activator, AraC family (SEQ ID NOs: 903, 904)
Group 20 (FIG. 21)
PF00936 92aa
PF00936 304aa
Acetaldehyde dehydrogenase 491aa (EC:1.2.1.10, PF00171)
Predicted alcohol dehydrogenase 404aa (EC:1.1.1.1, PF00465)
Acetaldehyde dehydrogenase 491aa (EC:1.2.1.10, PF00171)
Predicted alcohol dehydrogenase 435aa (PF00465)
Predicted alcohol dehydrogenase 404aa (EC:1.1.1.1, PF00465)
PF00936 90aa
EutP/PduV 156aa (PF10662)
PF00936 125aa
Conserved hypothetical protein 182aa (PF02915)
Mannose-6-phosphate isomerase, type 1 328aa (EC:5.3.1.8, PF01238)
EutP/PduV 148aa (PF10662)
PF00936 92aa
Glycerol dehydratase, large subunit 554aa (EC:4.2.1.30, PF02286)
Glycerol dehydratase, small subunit 176aa (EC:4.2.1.30, PF02287)
PF00936 363aa
PduL 220aa (PF06130)
Predicted microcompartment protein 332aa (PF06723)
Conserved hypothetical protein 316aa (PF02441)
PF03319 93aa
RnfC related NADH dehydrogenase 441′aa (PF01512, PF10531)
PF00936 182aa
RnfC related NADH dehydrogenase 442aa (PF01512, PF10531, PF01597)
PF00936 182aa
RnfC related NADH dehydrogenase 441aa (PF01512, PF10531)
PF00936 182aa
RnfC related NADH dehydrogenase 442aa (PF01512, PF10531, PF01597)
PF00936 182aa
Group 21 (FIG. 22)
EutQ (PF06249)
EutH (PF04346)
PF03319
Hypothetical protein
PduL (PF06130)
Ethanolamine utilization cobalamin adenosyltransferase (EC:2.5.1.17, PF01923)
PF00936
Acetaldehyde dehydrogenase (acetylating) (EC:1.2.1.10, PF00171)
PF00936
Ethanolamine ammonia-lyase light chain (EC:4.3.1.7, PF05985)
Ethanolamine ammonia-lyase heavy chain (EC:4.3.1.7, PF06751)
Reactivating factor of Adenosylcobalamin-dependent ethanolamine ammonia lyase (PF06277)
Alcohol dehydrogenase, class IV (PF00465)
Hypothetical protein
Alcohol dehydrogenase, class IV (PF00465)
Hypothetical protein
PF00936
Ethanolamine utilization protein, EutP (PF10662)
Response regulator with putative antiterminator output domain (PF00072, PF03861)
Signal transduction histidine kinase
(EC:2.7.3.-, PF12282, PF07568, PF02518)
Reactivating factor of Adenosylcobalamin-dependent ethanolamine ammonia lyase (PF06277)
Ethanolamine ammonia-lyase heavy chain (EC 4.3.1.7, PF06751)
Ethanolamine ammonia-lyase light chain (EC 4.3.1.7, PF05985)
PF00936
PF00936
Acetaldehyde dehydrogenase (acetylating)
(EC 1.2.1.10, PF00171)
PF00936
PF00936
Ethanolamine utilization cobalamin adenosyltransferase (EC:2.5.1.17, PF01923)
PduL
EutJ family protein (PF06723)
Conserved hypothetical protein
PF03319
Predicted NADH:ubiquinone oxidoreductase, subunit RnfC (PF01512, PF10531)
PF00936
EutH ethanolamine transporter (PF04346)
EutQ (PF06249)
Hypothetical protein
Hypothetical protein
PF00936
PF00936
Ethanolamine ammonia-lyase light chain (EC 4.3.1.7, PF05985)
Ethanolamine ammonia-lyase heavy chain (EC 4.3.1.7, PF06751)
Hypothetical protein
Signal transduction histidine kinase (PF02518, PF07568, PF12282)
Response regulator with putative antiterminator output domain (PF00072, PF03861)
Ethanolamine utilisation EutQ (PF06249)
Ethanolamine utilization protein EutP (PF10662)
PF00936
PF00936
Group 22 (FIG. 23)
TonB-dependent receptor plug 978aa (PF07715)
Glucosylceramidase 476aa (EC:3.2.1.45, PF02055)
Transcriptional regulator, DeoR family 260aa (PF00455, PF08220)
PduL 228aa (PF06130)
PF00936 90aa
PF00936 92aa
Acetate kinase 430aa (EC:2.7.2.1, PF00871)
PF00936 97aa
PF03319 99aa
Aldehyde dehydrogenase 499aa (PF00171)
PF03319 88aa
PF03319 126aa
Class II aldolase/adducin family protein 398aa (PF00596)
Lactate/malate dehydrogenase 309aa (EC:1.1.1.27, PF00056, PF02866)
Rhamnulokinase 482aa (EC:2.7.1.5, PF00370, PF02782)
L-rhamnose isomerase 423aa (EC:5.3.1.14, PF06134)
L-fuculose-phosphate aldolase 427aa (EC:4.1.2.17, PF00596, PF00596)
Rhamnulose-1-phosphate aldolase/alcohol dehydrogenase 729aa (PF00596, PF00106)
Major facilitator superfamily MFS_1 390aa (PF07690)
Respiratory-chain NADH dehydrogenase domain 51 kDa subunit 441aa (PF01512, PF10531)
PF00936 184aa
Group 23 (FIG. 24)
ABC transporter-related protein (PF00005, PF00664)
PF03319
PF00936
PF00936
Phosphatidate cytidylyltransferase (PF01148)
Diguanylate cyclase with GAF sensor (PF00990, PF01590)
PF03319
PF03319
RNA polymerase, sigma 70 subunit, RpoD family (PF00140, PF04539, PF04542, PF04545)
Group 24A (FIG. 25)
Ribulose 1,5-bisphosphate carboxylase large subunit (EC 4.1.1.39, PF02788, PF00016)
Ribulose 1,5-bisphosphate carboxylase small subunit (EC 4.1.1.39, PF00101)
putative carboxysome structural peptide CsoS2 (PF12288)
carboxysome shell protein CsoS3 (PF08936)
PF03319
PF03319
PF00936
PF00936
PF00936
Rubrerythrin (PF00210)
Hypothetical protein (PF01329)
Hypothetical protein
Ham 1-like protein (EC:3.6.1.15, PF01725)
PF00936
Transcriptional regulator, LysR family (PF00126, PF03466)
NADH dehydrogenase (ubiquinone) (EC:1.6.5.3, PF00361)
Hypothetical protein
Conserved hypothetical protein (PF10070)
Group 24B (FIG. 26)
PF00936
HAM1 family protein (EC:3.6.1.15, PF01725)
PF00936
Ribulose 1,5-bisphosphate carboxylase, large chain (EC:4.1.1.39, PF00016, PF02788)
Ribulose 1,5-bisphosphate carboxylase, small chain (EC:4.1.1.39, PF00101)
Carboxysome shell protein CsoS2 (PF12288)
Carboxysome shell protein CsoS3 (PF08936)
PF03319
PF03319
PF00936
Hypothetical protein (EC:4.2.1.96, PF01329)
Probable RuBisCo-expression protein Cbbx

[0093] It is contemplated that other organisms other than those shown in the Figures as also containing the Group of genes, will be found. The other organisms shown in the Figures as falling into a particular group as having the same cluster of genes is not to be seen as a finite or limiting list of organisms that may be contained within any particular Group. It is further contemplated that new Groups will be found based on the presence of bacterial micrompartment genes (Pfam 00936 and or Pfam03319) in their genomes in association with other genes encoding other enzymatic or protein functions and those Groups may be added to the present microcompartment catalog.

### Applications for Bacterial Microcompartment Sequences and Groups

[0094] Compartments and their associated proteins and enzymes as listed in the Sequence Listing and the Figures find use in transforming plants, seeds, and plant products, algae, bacteria and archaea in a variety of ways as described below and in the following Examples.

[0095] To test if the protein products of the selected genes have activity (e.g., carbon fixation activity), cell-free protein synthesis can be used to translate the DNA sequence of each gene into protein.

[0096] In one embodiment, genes encoding a bacterial compartment are cloned into an appropriate plasmid under an inducible promoter, inserted into vector, and used to transform cells, such as E. coli, cyanobacteria, plants, algae, or other photosynthetic organisms. This system maintains the expression of the inserted gene silent unless an inducer molecule (e.g., IPTG) is added to the medium.

[0097] Bacterial colonies are allowed to grow after induction of gene expression. In one embodiment, the presently described genes, proteins and/or RNA described in SEQ ID NOS: 1-1268, and herein referred to as generally bacterial compartments or microcompartments, are contemplated for use in any of the applications herein described. When referring to the bacterial compartments or microcompartments, it is meant to include any number of proteins, shell proteins or enzymes (e.g., dehydrogenases, aldolases, lyases, etc.) that comprise or are encapsulated in the compartment.

[0098] In another embodiment, an expression vector comprising a nucleic acid sequence for a cluster of bacterial compartment genes, selected from any of the polynucleotide sequences in SEQ ID NOS:1-1268, is expressed in an organism by addition of an inducer molecule.

[0099] In some embodiments, expression cassettes comprising a promoter operably linked to a heterologous nucleotide sequence of the invention, i.e., any nucleotide sequence in SEQ ID NOS:1-1268, that encodes a microcompartment RNA or polypeptide are further provided. In another embodiment, the expression cassette comprising the sequences of genes of one of the Groups of Table 1. Thus in another embodiment, the cassette is selected from the following groups of sequences: SEQ ID NOS: 1-20, 21-44, 45-68, 69-98, 99-146, 147-176, 177-234, 235-270, 271-296, 297-342, 343-386, 387-436, 437-482, 483-534, 535-560, 561-608, 609-634, 635-652 and 1251-1260, 653-668 and 1261-1268, 669-714, 715-772, 773-814, 815-860, 1055-1098, 861-902, 903-936-, 937-970, 971-994, 995-1054, 1099-1196, 1197-1232, or 1233-1250.

[0100] In some embodiments as in some organisms, the BMC gene cluster in the expression cassette is interrupted by a gene encoded off the opposite strand (see for example, FIG. 26A, Group 24B, in Prochlorococcus marinus MIT 9313, the second gene in the Group). Such interruptions may be important in regulation and/or stoichiometry and can be employed. In other embodiments, there is intergenic spacing which can be roughly proportional to the gaps in between genes in the rest of the genome (see for example, in FIG. 13C, Group 12A proxy organism, Trichodesmium erythraeum for some reason, prefers a lot of space between all of its genes, not just in BMCs).

[0101] The expression cassettes of the invention find use in generating transformed prokaryotic, eukaryotic cells and microorganisms, plants, and plant cells. The expression cassette will include 5′ and 3′ regulatory sequences operably linked to a polynucleotide of the invention. “Operably linked” is intended to mean functional linkage between two or more elements. For example, an operable linkage between a polynucleotide of interest and a regulatory sequence (i.e., a promoter) is functional link that allows for expression of the polynucleotide of interest. Operably linked elements may be contiguous or non-contiguous. When used to refer to the joining of two protein coding regions, by operably linked is intended that the coding regions are in the same reading frame. The cassette may additionally contain at least one additional gene to be cotransformed into the organism. Alternatively, the additional gene(s) can be provided on multiple expression cassettes. Such an expression cassette is provided with a plurality of restriction sites and/or recombination sites for insertion of the polynucleotide that encodes a microcompartment RNA or polypeptide to be under the transcriptional regulation of the regulatory regions. The expression cassette may additionally contain selectable marker genes.

[0102] The expression cassette will include in the 5′-3′ direction of transcription, a transcriptional initiation region (i.e., a promoter), translational initiation region, a polynucleotide of the invention, a translational termination region and, optionally, a transcriptional termination region functional in the host organism. The regulatory regions (i.e., promoters, transcriptional regulatory regions, and translational termination regions) and/or the polynucleotide of the invention may be native/analogous to the host cell or to each other. Alternatively, the regulatory regions and/or the polynucleotide of the invention may be heterologous to the host cell or to each other. As used herein, “heterologous” in reference to a sequence is a sequence that originates from a foreign species, or, if from the same species, is substantially modified from its native form in composition and/or genomic locus by deliberate human intervention. For example, a promoter operably linked to a heterologous polynucleotide is from a species different from the species from which the polynucleotide was derived, or, if from the same/analogous species, one or both are substantially modified from their original form and/or genomic locus, or the promoter is not the native promoter for the operably linked polynucleotide.

[0103] Where appropriate, the polynucleotides may be optimized for increased expression in the transformed organism. For example, the polynucleotides can be synthesized using preferred codons for improved expression.

[0104] Additional sequence modifications are known to enhance gene expression in a cellular host. These include elimination of sequences encoding spurious polyadenylation signals, exon-intron splice site signals, transposon-like repeats, and other such well-characterized sequences that may be deleterious to gene expression. The G-C content of the sequence may be adjusted to levels average for a given cellular host, as calculated by reference to known genes expressed in the host cell. When possible, the sequence is modified to avoid predicted hairpin secondary mRNA structures.

[0105] The expression cassette can also comprise a selectable marker gene for the selection of transformed cells. Selectable marker genes are utilized for the selection of transformed cells or tissues. Marker genes include genes encoding antibiotic resistance, such as those encoding neomycin phosphotransferase II (NEO) and hygromycin phosphotransferase (HPT), as well as genes conferring resistance to herbicidal compounds, such as glufosinate ammonium, bromoxynil, imidazolinones, and 2,4-dichlorophenoxyacetate (2,4-D). Additional selectable markers include phenotypic markers such as β-galactosidase and fluorescent proteins such as green fluorescent protein (GFP) (Su et al. (2004) Biotechnol Bioeng 85:610-9 and Fetter et al. (2004) Plant Cell 16:215-28), cyan florescent protein (CYP) (Bolte et al. (2004) J. Cell Science 117:943-54 and Kato et al. (2002) Plant Physiol 129:913-42), and yellow florescent protein (PhiYFP™ from Evrogen, see, Bolte et al. (2004) J. Cell Science 117:943-54). The above list of selectable marker genes is not meant to be limiting. Any selectable marker gene can be used in the present invention.

[0106] Generally, it will be beneficial to express the genes from an inducible promoter.

[0107] In one embodiment, a eukaryote, such as a plant, transformed by the microcompartment RNA or polypeptides of the present invention is a plant (or an offspring thereof) which is regenerated on the basis of host plant cells transformed with the gene of the present invention located under the control of a suitable promoter capable of functioning in eukaryotic cells, or with the gene of the present invention integrated in a suitable vector. The transformed organism of the present invention can express, in its body, the microcompartment and enzymes or proteins for metabolizing activity according to the present invention.

[0108] The expression vector usable in the method of transforming plant cells with the gene of the present invention include pUC vectors (for example pUC118, pUC119), pBR vectors (for example pBR322), pBI vectors (for example pBI112, pBI221), pGA vectors (pGA492, pGAH), pNC (manufactured by Nissan Chemical Industries, Ltd.). In addition, virus vectors can also be mentioned. The terminator gene to be ligated includes 35S terminator gene and Nos terminator gene.

[0109] The expression system usable in the method of transforming prokaryote and eukaryote cells with the genes of the present invention include any system utilizing RNA, DNA sequences. It can be used to transform transiently or stably the selected host (bacteria, fungus, plant and animal cells) It includes any plasmid vectors, such as pUC, pBR, pBI, pGA, pNC derived vectors (for example pUC118, pBR322, pBI221 and pGAH). It also includes any viral DNA or RNA fragments derived from virus such as phage and retro-virus derived (TRBO, pEYK, LSNLsrc). Genes presented in the invention can be expressed by direct translation in case of RNA viral expression system, transcribed after in vivo recombination, downstream of promoter recognized by the host expression system (such as pLac, pVGB, pBAD, pPMA1, pGal4, pHXT7, pMet26, pCaMV-35S, pCMV, pSV40, pEM-7, pNos, pUBQ10, pDET3, or pRBCS.) or downstream of a promoter present in the expression system (vector or linear DNA). Promoters can be from synthetic, viral, prokaryote and eukaryote origins

[0110] The method of introducing the constructed expression vector into a plant includes an indirect introduction method and a direct introduction method. The indirect introduction includes, for example, a method using Agrobacterium. The direct introduction method includes, for example, an electroporation method, a particle gun method, a polyethylene glycol method, a microinjection method, a silicon carbide method etc.

[0111] The method of regenerating a plant individual from the transformed plant cells is not particularly limited, and may make use of techniques known in the art.

[0112] In another embodiment, the microcompartment proteins of the present invention can be produced by methods used conventionally for protein purification and isolation by a suitable combination of various kinds of column chromatography (e.g. gel filtration, ion-exchange), prepared by a chemical synthesis method using a peptide synthesizer (for example, peptide synthesizer 430A manufactured by Perkin Elmer Japan) or by a recombination method using a suitable host cell selected from prokaryotes and eukaryotes.

[0113] In another embodiment, an expression vector having any one of the nucleic acid sequences in SEQ ID NOS: 1 to 1268 and amplifiable in a desired host cells is used to transform bacteria, yeasts, insects or animal cells, and the transformed cells are cultured under suitable culture conditions, whereby a large amount of the protein can be obtained as a recombinant. Culture of the transformant can be carried out by general methods.

[0114] The method used in purifying the protein of the present invention from a culture mixture can be suitably selected from methods used usually in protein purification. That is, a proper method can be selected suitably from usually used methods such as salting-out, ultrafiltration, isoelectric precipitation, gel filtration, electrophoresis, ion-exchange chromatography, hydrophobic chromatography, various kinds of affinity chromatography such as antibody chromatography, chromatofocusing, adsorption chromatography and reverse phase chromatography, using a HPLC system etc. if necessary, and these techniques may be used in purification in a suitable order.

[0115] Further, the microcompartment proteins of the present invention can also be expressed as a fusion protein with another protein or a tag (for example, glutathione S transferase, protein A, hexahistidine tag, FLAG tag, etc.). The expressed fusion protein can be cleaved off with a suitable protease (for example, thrombin etc.), and preparation of the protein can be carried out more advantageously in some cases. Purification of the protein of the present invention may be carried out by using a suitable combination of general techniques familiar to those skilled in the art, and particularly upon expression of the protein in the form of a fusion protein, a purification method characteristic of the form is preferably adopted. Further, a method of obtaining the protein by using the recombinant DNA molecule in a cell-free synthesis method (J. Sambrook, et al.: Molecular Cloning 2nd ed. (1989)) is one of the methods for producing the protein by genetic engineering techniques.

[0116] A protein of the present invention can be prepared as it is, or in the form of a fusion protein with another protein, but the protein of the present invention can be changed into various forms without limitation to the fusion protein. For example, the processing of the protein by various techniques known to those skilled in the art, such as various chemical modifications of the protein, binding thereof to a polymer such as polyethylene glycol, and binding thereof to an insoluble carrier, may be conducted. The presence or absence of addition of sugar chains or a difference in the degree of addition of sugar chains can be recognized depending on the host used. The proteins in such cases are also construed to be under the concept of the present invention insofar as they function as proteins having microcompartment activity.

[0117] In one embodiment, an in-vitro transcription/translation system (e.g., Roche RTS 100 E. coli HY) can be used to produce cell-free microcompartments or expression products of the current invention.

[0118] In some embodiments, it is preferred that the microcompartments, comprising a Group of the microcompartment nucleic acids, proteins or polypeptides as selected from one of the 32 Groups, should provide an organism enhanced biomass production and CO₂ sequestration abilities, but however, be non-toxic or have low toxicity levels to humans, animals and plants or other organisms that are not the target.

[0119] In some embodiments, the expression cassette comprising the sequences of genes of one of the Groups of Table 1 are combined with a microcompartment protein from another Group of Table 1, i.e., any nucleotide sequence in SEQ ID NOS:1-1268, that encodes a microcompartment RNA or polypeptide can be selected and combined with any other. In another embodiment, a nucleotide sequence encoding a non-microcompartment protein, such as genes encoding plant RuBisCO, is combined with microcompartment expression cassettes.

[0120] The microcompartment proteins are preferably incorporated into a plant or microorganism to provide new or enhanced metabolic activity, and more often than not, to provide enhanced carbon fixation and sequestration activity in the plant or organism.

### Example 1

### Expression of Carboxysome (Components) from Synechocystis 6803 in Chlamydomonas

[0121] The expression of carboxysome (components) from Synechocystis 6803 in Chlamydomonas will provide an improvement of biomass production/CO₂ sequestration in Chlamydomonas by reduction of photorespiration using a CO₂ concentration “cage.” This will also provide groundwork for further engineering of Chlamydomonas and other algae with microcompartment-based catalysis.

[0122] Common to all strategies: (1) Gene synthesis for codon optimization for expression; (2) Systematic variation of the components included (CcaA, CcmM, RbcX, CcmN, etc); (3) Initially, transformation of cell wall mutant strain (displays high transformation efficiency) by glass-bead transformation or/and biolistic/gene-gun (electroporation as a last option due to plasmid size); (4) Antibiotic selection and PCR to check for complete integration, western blot analysis for shell protein expression, carboxysome formation and RuBisCO sequestration; (5) Confirmation of shell formation by EM; (6) Mating with wild type strain and carbonic anhydrase mutants (cia3 mutant and cia 6,7 if available) and screen for improve growth under low CO₂/O₂ ratio, preliminary test on solid media and extension to liquid media for CRII and CRIII strategies; (7) Option to apply directed evolution to optimize algal phenotype followed by resequencing.

[0123] Strategy CRI: Reconstitution of a carboxysome in Chlamydomonas cytosol: (1) Generation of vector for shell protein expression (+/− component enzymes) in Chlamydomonas cytosol. Co-expression of CcmK, L, and +/−N and +/−M and +/−CcaA and +/−RuBisCO large and small subunits from Synechocystis.

[0124] Strategy CRII: Reconstitution of a functional carboxysome that encapsulates Chlamydomonas RuBisCO: (1) Use of the vectors from CRI and insertion of chloroplast targeting signal peptide to target shell proteins +/− a subset of carboxysome interior components (N, M and CcaA); (2) Generation of a plasmid for chloroplast transformation to express directly shell proteins (CcmK, L) +/− component enzymes (N, M and CcaA) in Chlamydomonas chloroplast.

[0125] Strategy CrIII: Reconstitution of a complete cyanobacterial carboxysome into Chlamydomonas chloroplast: (1) Use of the vectors from CRII allowing the targeting of shell proteins, a subset of carboxysome interior components selected from CRI and CRII experiments and insertion of RuBisCO large and small subunit genes from Synechocystis; (2) Use of the vectors from CRII allowing chloroplast transformation for direct chloroplastic expression of shell proteins, subset of carboxysome interior components selected from CRI and CRII experiments and the RuBisCO large and small subunits from Synechocystis.

### Example 2

### C3-Plant Carboxysome Engineering

[0126] The present method also enables the improvement of biomass production in C3-plant by reduction of photorespiration/CO2 sequestration using a CO2 concentration “cage” from Cyanobacteria by reconstitution of carboxysome (components) from Synechocystis 6803 in C3-plants. Model species that can be used: Arabidopsis and Tobacco

[0127] Common to all strategies: (1) Gene synthesis for codon optimization for Arabidopsis/Tobacco expression; (2) Floral dipping for agro-transformation of Arabidopsis wild type and RuBisCO-mutants for nucleic integration of T-DNA carrying genes of interest; (3) Biolistic/gene-gun for chloroplastic transformation in tobacco; (4) Antibiotic selection and PCR check for complete integration, western blot analysis for shell protein expression, carboxysome formation and RuBisCO sequestration; (5) Confirmation of shell formation by EM; (6) Screen for improved growth under low CO₂/O₂ ratio.

[0128] Strategy AtI: Reconstitution of a carboxysome in Arabidopsis cytosol: Generation of T-DNA for shell protein expression (+/− component enzymes) in Arabidopsis cytosol. Co-expression of ccmK, L, and: Component enzymes: +/−N and +/−M and +/−CcaA and +/−RuBisCO large and small subunits from Synechocystis.

[0129] Strategy AtII: Reconstitution of a functional carboxysome that encapsulates Arabidopsis/Tobacco RuBisCO: (1) Use of the T-DNA from AtI and insertion of chloroplast targeting signal peptide to target shell proteins +/− a subset of carboxysome interior components (N, M and CcaA). Transformation of Arabidopsis plants; (2) Generation of a plasmid for chloroplastic transformation to directly express shell proteins (ccmK, L) +/− component enzymes (N, M and CcaA) in chloroplast. Chloroplast transformation in Tobacco (Tobacco as model system, because technique already well established).

[0130] Strategy AtIII: Reconstitution of a complete cyanobacterial carboxysome into Arabidopsis/Tobacco chloroplast: (1) Use of the T-DNA from AtII allowing the targeting of shell proteins, a subset of carboxysome interior components selected from AtI and AtII experiments and insertion of RuBisCO large and small subunit genes from Synechocystis. Transformation of Arabidopsis plants; (2) Use of the vectors from AtII allowing chloroplastic transformation for direct chloroplastic expression of shell proteins, subset of carboxysome interior components selected from AtI and AtII experiments and the RuBisCO large and small subunits from Synechocystis. Chloroplast transformation in Tobacco.

### Example 3

### Expression of Carboxysome (Components) from Synechocystis 6803 in Yeast

[0131] All microcompartment components can be expressed in yeast (wild type or mutant strains) after codon optimization. The advantage of codon optimization is that it will reduce the influence of translation efficiency and will facilitate optimizing protein ratio of each component of a desired micro-compartment. To generate micro-compartments in yeast, components need to be expressed with selected promoters and plasmids in order to obtain the right protein ratio for each component. Plasmids can be low or high copy replicative vectors (i.e. pRS series) or integrative (i.e.; YIplac series). Alternatively, plasmid can be replaced by a DNA fragment that will be integrated in the genome via targeted recombination to replace a host ORF by another one encoding for a component(s) of the micro-compartment. When plasmids are used, an expression cassette is usually required and consists of a gene(s) of interest inserted downstream of a selected promoter, which can be tunable (pMet26, pGal4) or constitutive (pPMA1, pADH, pPGK, pHHT7, or . . . ) to reach desired level of expression. Maintenance, selection or modification of a yeast is assisted by the use of antibiotic selection markers (kanamycin, Zeocin, hygromycin) or/and with auxotrophy markers (URA3, LEU2, HIS3, . . . ). For proteins that required to be expressed at equal ratio, chimera protein expression strategy can be used. It consists of the expression a large protein derived from the fusion of 2 or more proteins of interest. These proteins will be separated by a small protease recognition site, which will be cleaved in the host cell to produce the individual proteins. The production of micro-compartments in yeast will be achieved by expressing shell proteins with or without the internal components. For example, genes encoding for a carboxysome shell proteins such as pentamers (e.g. CsoS4A and CsoS4B) and (pseudo)hexamers (e.g. CcmK, CcmO, CcmP, CsoS1 and CsoS1D) will be expressed at high and low levels respectively and using a high copy plasmid and a genomic integration strategy respectively. This microcompartment could be used to isolate and to purify oxygen sensitive proteins (e.i. Pyruvate Formate-Lyase) or toxic proteins (e.i. RNase, ccdB protein). The sequestration of a desired protein this carboxysome can be achieved by the production of a chimera gene containing the sequences of a targeting peptide or the RubisCO subunits (e.g cbbS, cbbL), the protein of interest and a protease site (such as TEV) in between. The peptide or RubisCO subunit will allow the sequestration of the protein of interest into the micro-compartments and could be subsequently used for its purification (e.g. using an antibody targeted against the Ibbs). The protease will be used to cleave the RubisCO subunit or peptide from the protein of interest after purification.

[0132] In the case of the expression of a new enzymatic pathway that would be sequestered in a micro-compartment in yeast, the same strategy could be use to express the desired micro-compartment together with its native sequestered biosynthetic pathway.

### Example 4

### Expression of Carboxysome (Components) from Synechocystis 6803 in Bacteria

[0133] All carboxysome components can be expressed in bacteria (wild type or mutant strains) directly after codon optimization. The advantage of codon optimization is that it reduces the influence of translation efficiency and will facilitate obtaining the optimal protein ratio required to form a functional micro-compartment. The optimal expression levels for each component will be achieved using a combination of promoters that are, tunable (e.g. pVGB, pLAC and pBAD) or constitutive (pBLA, pPL, pSPC) and a combination of rbs sites. Selection of modified bacterial strain can be conduction under antibiotic selection (kanamycin, Zeocin, hygromycin) or/and with auxotrophy markers (uracil, leucine). For proteins that required to be expressed as equal level, they will be expressed together with the same promoter using the same rbs.

[0134] The production of microcompartments in E. coli can be achieved by expressing shell proteins with or without the internal microcompartment components. For example, the conversion of ethanolamine into ethanol and acetyl-CoA could be achieved by reconstituting a functional ethanolamine micro-compartment from Salmonella enterica. For this proposed transformation, a similar operon as in Salmonella (FIGS. 16A and 16B (Group 15, SEQ ID NOs: 773-814), FIG. 18 (Group 17, SEQ ID NOs: 1055-1098), FIG. 20A, 20B (Group 19, SEQ ID NOs: 903-936), or FIG. 22 (Group 21, SEQ ID NOs: 1099-1196) could be generated with known promoter and rbc and codon optimized sequences of genes encoding the microcompartment components. According to the level of expression that needs to be achieved for some of the components such as the hexameric shell proteins, a medium-high copy plasmid could be used (in contrast to the other components that would be carried in a low copy plasmid). These combinations of high-low copy plasmids, promoters and rbs sequences will allow one to achieve the correct expression ratio of each component. To reconstitute the ethanolamine microcompartment, a minimum of 9 proteins presumably are required: hexameric shell proteins (EutS, L and K; SEQ ID NOS:905,906; 933,934; 935,936), pentameric shell proteins (EutM and N; SEQ ID NOS:915,916; 917,918), AdoCbl-dependent ethanolamine ammonia-lyase complex (EutB and C; SEQ ID NOS:929,930; 931,932); aldehyde dehydrogenase (EutE; SEQ ID NOS:919,920) and alcohol dehydrogenase (EutG; SEQ ID NOS:923,924). Additional genes such as EutH (SEQ ID NOS: 925,926), could be expressed to together with these microcompartment genes to improve conversion efficiency. In such particular case, the transporter EutH would increase the import of ethanolamine into the cell.

[0135] Alternatively, the 9 proteins could be provided in a cassette where the genes are ordered substantially as their order appears in any of the Groups shown above. In one embodiment, the genes in the cassette are ordered substantially as their order appears in Group 19 as:. EutS (SEQ ID NOS:905, 906), EutM and N (SEQ ID NOS:915,916; 917,918); EutE (SEQ ID NOS:919,920); EutG (SEQ ID NOS:923,924); EutH (SEQ ID NOS: 925,926); EutB and C (SEQ ID NOS:929,930; 931,932); EutL and K; SEQ ID NOS: 933,934; 935,936).

### Example 5

### Enhanced Expression of Carboxysome (Components) with Other Activity in Bacteria

[0136] As described in Example 1, to reconstitute the carboxysome microcompartment, genes found in Group 12 and for example, genes encoding any of the following: PF00936 258aa, CcmN 304aa, Protein tyrosine phosphatase (COG0394), CcmM 672aa, PF03319 100aa [RGSA pore], PF00936 112aa [KIGS pore], PF00936 103aa [KIGS pore], the large (Pfam00016/02788) and small (Pfam00101) subunits of RuBisCO, the RuBisCO chaperone, RbcX (Pfam02341) and additional shell (Pfam00936) proteins, are expressed together with plant RuBisCO or RuBisCO activase from another cyanobacterium (e.g. Acaryochloris marina: locus tag AM1_{—}1781, Accession number YP001516116 to improve CO₂ fixation efficiency or enhance activity of the microcompartment.

[0137] The above examples are provided to illustrate the invention but not to limit its scope. Other variants of the invention will be readily apparent to one of ordinary skill in the art and are encompassed by the appended claims. All publications, databases, and patents cited herein are hereby incorporated by reference for all purposes.

TABLE 2
Table 2

| | Figure | SEQ ID | Representative | Potentially encapsulated | Organism |
|---|---|---|---|---|---|
| Group | Number(s) | Numbers | organism | reactions | phenotypes |
| 12 and 12A | 13A-D, other frags | 635-652, | Anabaena variabilis | Bicarbonate −> carbon | Aerobe |
| | in genome not | 653-668 | ATCC 29413, | dioxide −> glycerate 3- | |
| | shown | | Trichodesmium | phosphate | |
| | | | orythraeum IMS101 | | |
| 24A, 24B | 25A, 26A | 937-970, | Thiomicrospira | | |
| | | 971-944 | crunogena XCL-2, | | |
| | | | Prochlorococcus | | |
| 15, 19, 21 | 16A, 16B, | 773-814, | Salmonella typhimurium | Ethanolamine −> | Aerobe |
| | 20A, 20B, 22A | 905-938, | LT2 (Proteobacteria) | Acetaldehyde −> Acetyl- | |
| | | bacteroides | Clostridium | CoA | |
| | | | phytofermentans ISDg | | |
| | | | (Firmicutes), Alkaphilus | | |
| | | | metalliredigens, | | |
| | | | Bacteroides capillosus | | |
| | | | ATCC 29799 | | |
| 8, 18, | 9A, 9B, 18, | 387-436, | Salmonella typhimurium | 1,2-propanediol −> | Aerobe |
| | 19A, 19B | 861-902, | LT2, Desulfatibacillum | proprionaldehyde −> | |
| | | | alkenivorans AK-01, | propanol | |
| 4, 5, 6 | 5A, | 177-234, | Rhodopseudomonas | 1,2-propanediol −> | Generally |
| | 5B, 6A, 6B, 7A, 7B | 235-270, | palustris BisB18/E. coli | propionaldehyde −> | anaerobic; |
| | | 297-342 | CFT073/Shewanella | propanol | maybe |
| | | | putrefasciens CN-32 | | facultative |
| 2 | 3A, 3B | 69-98 | Ruminococcus obeum | Fuculose-1-phosphate −> | Anaerobe |
| | | | ATCC 29174 | lactaldehyde −> 1,2- | |
| | | | Clostridium | propanediol −> | |
| | | | phytofermentans ISDg | proprionaldehyde −> | |
| | | | | propanol | |
| 20 | 21A | 995-1054 | Clostridium kluyveri | Ethanol −> Acetaldehyde −> | Anaerobe; |
| | | | DSM 555 | Acetyl-CoA | Can grow on |
| | | | | | ethanol, |
| | | | | | acetate only |
| 9 | 10A, 10B | 535-550 | Blastopirellula marina | Fuculose-1-phosphate −> | Aerobe |
| | | | DSM 3645 | lactaldehyde −> ? | |
| 22 | 23A | 1197-1232 | Opitutus terrae PB90-1 | Fuculose-1-phosphate or | Obligate |
| | | | | rhamnulose-1-phosphate −> | anaerobe |
| | | | | lactaldehyde −> lactate | |
| 7, 13, 14, 16 | 8A, 8B, 14A, 15A, | 3434-386, | Clostridium | Unknown; Highest | Anaerobe |
| | 15B 17A, 17B | 669-714, | phytofermentans ISDg, | homology to glycerol | |
| | | 715-772, | E. coli UT189, | dehydratase, but not a GD | |
| | | 815-860 | Desulfotalea | | |
| | | | psychrophila LSv54, | | |
| | | | Alkaphilus | | |
| 21 | 22A | 1099-1196 | Bacteroides capillosus | N-acetyl-glutamylphosphate −> | Aerotolerant |
| | | | ATCC 29799 | N-acetylglutamate | anaerobe; |
| | | | | semialdehyde −> N- | pathogen |
| | | | | acetylomithine | |
| 1 | 2A, 2B | 1 to 20 | Mycobacterium | L-aspartate-4- | Aerobe, non |
| | | | smegmatis MC2 155 | semialdehyde or glutamate- | pathogenic |
| | | | | 5-semialdehyde based | |
| | | | | reactions | |
| 11 | 12A, 12B | 609-634 | Haliangium ochraceum | Homoserine <--> L- | Aerobe |
| | | | SMP-2 | aspartate-4-semialdehyde <−> ? | |
| 3 | 4A, 4B | 99-142 | Alkaliphilus | Hypoxanthine −> xanthine −> | Anaerobe |
| | | | metalliredigens QYMF | 5-ureido-4-imidazole | |
| | | | | carboxylate | |
| 10 | 11A | 561-608 | Methylibium | Unknown aldehyde | Aerobe |
| | | | petroleiphilum PM1- | metabolism | |
| | | | plasmid | | |
| 23 | 24A | 1233-1250 | Chloroherpeton | Unknown | Anaerobic, |
| | | | thalassium ATCC | | photoautotro- |
| | | | 35110 | | phic |
| 17 | 18 | 1055-1098 | Leptotrichia buccalis C- | | |
| | | | 1013-b | | |

| | Enzymes (proposed | Proposed Reason | |
|---|---|---|---|
| Group | from annotation) | for Encapsulation | Additional Notes |
| 12 and 12A | Carbonic anhydrase, | RuBisCO | |
| | RuBisCO | inefficiency, | |
| | | RuBisCO oxygen | |
| | | sensitivity, product | |
| 24A, 24B | | | |
| 15, 19, 21 | Ethanolamine ammonia | Oxygen sensitivity, | |
| | lyase (EutBC), | product | |
| | acetaldehyde | volatility/toxicity | |
| | dehydrogenase (EutE) | | |
| 8, 18, | 1,2-propanediol | Oxygen sensitivity, | |
| | dehydratase (PduCDE); | product | |
| | B12-dependent; | volatility/toxicity | |
| | propionaldehyde | | |
| | dehydrogenase (PduP) | | |
| 4, 5, 6 | Putative 1,2-propanediol | Oxygen sensitivity, | |
| | dehydratase, B12- | product | |
| | independent (GRE); | volatility/toxicity | |
| | propionaldehyde | | |
| | dehydrogenase (PduP) | | |
| 2 | Putative 1,2-propanediol | Product | A fusion of the B12- |
| | dehydratase, B12- | volatility/toxicity | independent 1,2- |
| | independent (GRE); | | propandiol dehydratase |
| | propionaldehyde | | and fuculose degradation |
| | dehydrogenase (PduP); | | pathways |
| | Fuculose-1-phosphate | | |
| | aldolase, lactaldehyde | | |
| | oxidoreductase | | |
| 20 | Aldehyde | Product | No nearby 03319 genes; |
| | dehydrogenase; alcohol | volatility/toxicity | Alcohol dehydrogenases |
| | dehydrogenase | | are probably |
| | | | encapsulated from |
| | | | experimental evidence |
| 9 | Fuculose-1-phosphate | Product | |
| | aldolase | volatility/toxicity | |
| 22 | Fuculose/rhamnulose-1- | Product | Nearly identical to the |
| | phosphate aldolase; | volatility/toxicity | enzymes found in |
| | aldehyde | | Planctomycetes but also |
| | dehydrogenase | | includes the rhamnulose |
| | | | degradation pathway |
| 7, 13, 14, 16 | Unknown glycyl radical | Oxygen sensitivity, | |
| | enzyme with homology | product | |
| | to glycerol dehydratase | volatility/toxicity | |
| 21 | N-acetyl- | Product | Contains entire glutamate - |
| | gammaglutamyl | volatility/toxicity | arginine conversion |
| | phosphate reductase, | | pathway; 2 00936 |
| | acetylornithine | | proteins, no nearby |
| | aminotransferase | | 03319s |
| 1 | Aldehyde | Product | |
| | dehydrogenase: | volatility/toxicity | |
| | aminotransferase type | | |
| | III | | |
| 11 | L-homoserine: NAD + | Product | |
| | oxidoreductase (not in | volatility/toxicity | |
| | BMC; in genome); | | |
| | dihydrodipicolinate | | |
| | synthase or other | | |
| | enzymes that function | | |
| | on L-aspartate-4- | | |
| | semialdehyde (not in | | |
| | BMC; in genome) | | |
| 3 | Xanthine | Xanthine toxicity | |
| | dehydrogenase; | | |
| | Xanthine hydrolase | | |
| 10 | PduP/EutE aldehyde | Product | |
| | dehydrogenase; putative | volatility/toxicity | |
| | glutathione dependent | | |
| | formaldeyde | | |
| | dehydrogenase | | |
| 23 | No readily apparent | Unknown | 2 pfam00936, 3 |
| | encapsulated enzymes | | pfam03319 scattered |
| | near 00936/03319 | | throughout genome |
| | proteins | | |
| 17 | | | |

What is claimed is:

1. An expression cassette comprising a cluster of microcompartment genes isolated from a bacteria, wherein the cluster comprising a set of microcompartment genes necessary for the expression of a microcompartment, wherein the microcompartment genes are selected from the gene sequences of SEQ ID NOS:1-1268.

2. A bacterial compartment expressed from an expression cassette of claim 1.

3. The expression cassette of claim 1 comprising groups selected from the following groups of sequences: SEQ ID NOS: 1-20, 21-44, 45-68, 69-98, 99-146, 147-176, 177-234, 235-270, 271-296, 297-342, 343-386, 387-436, 437-482, 483-534, 535-560, 561-608, 609-634, 635-652 and 1251-1260, 653-668 and 1261-1268, 669-714, 715-772, 773-814, 815-860, 1055-1098, 861-902, 903-936-, 937-970, 971-994, 995-1054, 1099-1196, 1197-1232, or 1233-1250.

4. A cell comprising in its genome at least one stably incorporated expression cassette, said expression cassette comprising a heterologous nucleotide sequence or groups of sequences of claim 1 operably linked to a promoter that drives expression in the cell.

5. The cell of claim 4 wherein the cell is bacterial, archeal, yeast, fungal or other prokaryotic or eukaryotic origin.

6. A plant comprising in its genome at least one stably incorporated expression cassette of claim 1.

7. The plant of claim 6 having new or enhanced carbon fixation activity as a result of the expression of said expression cassette.

8. A photosynthetic organism comprising in its genome at least one stably incorporated expression cassette of claim 1.

9. The photosynthetic organism of claim 6 having new or enhanced carbon fixation, biomass production or carbon dioxide sequestration activity as a result of the expression of said expression cassette.

10. An expression cassette comprising the expression cassette of claim 1 operably linked to a promoter that drives expression in a plant.

11. The expression cassette of claim 10 further comprising an operably linked polynucleotide encoding a signal peptide.

12. A plant comprising in its genome at least one stably incorporated expression cassette, said expression cassette comprising a heterologous nucleotide sequence of claim 10 operably linked to a promoter that drives expression in the plant.

13. The plant of claim 12, wherein said plant displays enhanced carbon fixation activity.

14. A transformed seed of the plant of claim 12.

15. A method for enhancing carbon fixation activity in an organism, said method comprising introducing into an organism at least one expression cassette operably linked to a promoter that drives expression in the organism, said expression cassette comprising a cluster of microcompartment genes isolated from a bacteria, wherein the cluster comprising a set microcompartment genes necessary for the expression of a microcompartment that has carbon fixation activity.

16. The method of claim 15, wherein the microcompartment genes are selected from the odd numbered gene sequences in the Sequence Listing.

17. The method of claim 15, wherein the cluster selected from the following groups of sequences: SEQ ID NOS: 1-20, 21-44, 45-68, 69-98, 99-146, 147-176, 177-234, 235-270, 271-296, 297-342, 343-386, 387-436, 437-482, 483-534, 535-560, 561-608, 609-634, 635-652 and 1251-1260, 653-668 and 1261-1268, 669-714, 715-772, 773-814, 815-860, 1055-1098, 861-902, 903-936-, 937-970, 971-994, 995-1054, 1099-1196, 1197-1232, or 1233-1250.

18. A bacterial microcompartment catalog comprising a total of 1286 sequences encoding bacterial microcompartments, the proteins of each of which can be inserted into a host organism capable of being expressed using an inducible expression system.

19. The expression cassette of claim 3 further comprising a gene encoding a microcompartment protein selected from another group from claim 3.

20. The expression cassette of claim 19, further comprising a nucleotide sequence encoding a non-microcompartment protein to improve CO₂ fixation efficiency or enhance activity of the microcompartment.

The application's sequence listing, which the Patent Office published only in electronic form, follows.

SEQUENCE LISTING (1268 sequences)

SEQ ID NO: 1 - DNA, 255 bp, Mycobacterium smegmatis MC2 155
atgtacgactacggcacgttcgcgttcgcgtccaaagccgatgtgctggaccaggccaaggcgttctggaatccggacaagacccagttctggaccgactccggcgtcgatctggtgatcgaccgccgggaggggtacttcctgtgggacatgagcggacgccggctcatcgacctccacctcaacggcggcacctacaacatcggtcaccgcaatcccgaagtgatgcaggcgatctcggaaggcatggcgcac

SEQ ID NO: 2 - protein, 255 aa, Mycobacterium smegmatis MC2 155
MYDYGTFAFASKADVLDQAKAFWNPDKTQFWTDSGVDLVIDRREGYFLWDMSGRRLIDLHLNGGTYNIGHRNPEVMQAISEGMAHFDVGNHHFPSVARTALAKRLVETAPASIKKVAFGSGGGEAIDIALKSARHGTQRRKIVSVIKAYHGHTGLAVATGDDRFAKLFLADRPDEFIQVPFGDIGAMEAALAGGDVAAVIMETIPATYGFPLPPPGYLEAVKALTERHGTLYIADEVQTGLMRTGELWGITKHGI

SEQ ID NO: 3 - DNA, 255 bp, Mycobacterium smegmatis MC2 155
gtgagcgaagtgatccaagaccggcgcagcgcagtcgacaccgcgcgggccggccacatgctcgagcgtgcgcgctgggccgctgcggcctacggcgagtacgacgcggcgacggtcgagggcatcgtcgcagccgtggccgaggccgcacacgctcatgccgagcggttcgccgccgacgcggtggccgagaccggcatgggcgtggtcgcggacaaggtccgcaagaaccgggcgtgttcgaggggaatcgtc

SEQ ID NO: 4 - protein, 255 aa, Mycobacterium smegmatis MC2 155
MSEVIQDRRSAVDTARAGHMLERARWAAAAYGEYDAATVEGIVAAVAEAAHAHAERFAADAVAETGMGVVADKVRKNRACSRGIVEYYRGHDYISPRVDPDRKIVELPRPAGVVLALTPTTNPVATVYFKTILALMTRNAVVVAPHPRAARCSAEAARVLAEAAVAAGAPDGVVQVIDEPSIPLVQALMADERTDVIVATGGTAVVRAAYSSGNPALGVGPGNVPVLVDASADVAAAAQRIVDSKAFDNSVLCTN

SEQ ID NO: 5 - DNA, 255 bp, Mycobacterium smegmatis MC2 155
gtggcagaactacgttccttcatcttcatcgaccggctccagccgcagacgatgtcgtacctgggcacctggatcaagggtgcgctgccccgcgcgaacatggccgcccagatcatcgaggtggcaccgggactcgacatcgagggtgtcaccgacgtcgccctcaagcacgccgaggtgaaggccgggatcctggtggtcgagcgccagttcggctatctggagttccacggtgagaccggcgcggtgaaggcc

SEQ ID NO: 6 - protein, 202 aa, Mycobacterium smegmatis MC2 155
MAELRSFIFIDRLQPQTMSYLGTWIKGALPRANMAAQIIEVAPGLDIEGVTDVALKHAEVKAGILVVERQFGYLEFHGETGAVKAAADAALDYLGGDPDAAVRPEILASRIISSIDHQHAFLINRNKIGSMVLPGESLFVLEVAPASYAILATNEAEKAADVKVVDFRMIGATGRVYLSGTEADVRQAADAARDALAVLQGA

SEQ ID NO: 7 - DNA, 255 bp, Mycobacterium smegmatis MC2 155
atgggcatcacgcgtgaggaattgcgcgccctggtacgggaagtcgtgcgtgaggccgtgggcagcctgaactcctcgccggcgcaggcgtcgaatcaggcatcgaagccggccccgcctgcgcccccgccacgtgcgaccgtcgccgaccagatgggcctggaaccgacggggccacgggccgtcgagggacgcaaccgcaccgagaccgtgcgcctgaccgacgacaaggatctcgacacattcgtgcggaag

SEQ ID NO: 8 - protein, 173 aa, Mycobacterium smegmatis MC2 155
MGITREELRALVREVVREAVGSLNSSPAQASNQASKPAPPAPPPRATVADQMGLEPTGPRAVEGRNRTETVRLTDDKDLDTFVRKLLRLFESPKTRADLKAGRLRFRLAPGSGAAMANGQAQVTHRIDSGAVTERHIADLAGGTLVLGPRAVLTPLAREKARTLGIVIEKERR

SEQ ID NO: 9 - DNA, 264 bp, Mycobacterium smegmatis MC2 155
gtgttgagagcgaccgtcaccggcaatgtgtggtcgacgcgccggatcgagggcatcccggccggcgcgttcctggaggtcgaggtcgagggcaccggcagccggatgatcgccttcgacgtcctcggcagcggcgtgggcgaacacgtcctgatcgcccagggctcggtggcgtcgagttggttcaccgggacgccaccgccgatcgacgccctcatcatcggctccatcgacaccagatcagatagcaaccccgccgagtaa

SEQ ID NO: 10 - protein, 87 aa, Mycobacterium smegmatis MC2 155
MLRATVTGNVWSTRRIEGIPAGAFLEVEVEGTGSRMIAFDVLGSGVGEHVLIAQGSVASSWFTGTPPPIDALIIGSIDTRSDSNPAE

SEQ ID NO: 11 - DNA, 282 bp, Mycobacterium smegmatis MC2 155
atgtccagcaacgcaatcggattgatcgagaccaagggttacgtggccgccctggccgctgccgacgccatggtcaaggccgccaacgtcaccatcaccgaccgccagcaggtgggcgacggactcgtcgcggtgatcgtcacgggtgaggtcggcgcggtcaaggccgcgaccgaggccggcgccgaaaccgcctcgcaggtcggcgaactcgtcagcgtgcatgtcatcccgcgtccgcacagcgaactgggcgcgcacttctcggtgtccagcaagtag

SEQ ID NO: 12 - protein, 93 aa, Mycobacterium smegmatis MC2 155
MSSNAIGLIETKGYVAALAAADAMVKAANVTITDRQQVGDGLVAVIVTGEVGAVKAATEAGAETASQVGELVSVHVIPRPHSELGAHFSVSSK

SEQ ID NO: 13 - DNA, 255 bp, Mycobacterium smegmatis MC2 155
atggtcgcaccggaaaccgagaggatccgtacccagatccgcgtctacctgctggtcgaagacctgcagcggcagttcgcggcctacctcggtaccccgacccgggcccgcggctatccgccgtacgagggcgagcacgcgctgatcgtcgaggtgtccccggcactggcgatcgagcgcgtgatcgacctggcgctgcgcgcggtgccgggcgtccagcccggaatcctctacgtcgagcggcagttcggcgta

SEQ ID NO: 14 - protein, 218 aa, Mycobacterium smegmatis MC2 155
MVAPETERIRTQIRVYLLVEDLQRQFAAYLGTPTRARGYPPYEGEHALIVEVSPALAIERVIDLALRAVPGVQPGILYVERQFGVLEIHSASLDEVRRAGEAILAGTGNRAEDQLRPRVLFHDIITDITDQHAVILNRNRQASMILPGQSLLVYEMTPALFAAVAANEAERVAPGLTVVDVQMIGAAGRLYIGGSTDEVTVARDHITTVLSAIEGQEH

SEQ ID NO: 15 - DNA, 255 bp, Mycobacterium smegmatis MC2 155
atgggcgtgatcaccgacgatgtcaccatcgcacaacaggcactgacgcattacgacgtctccgacaacgcgtccctgcgactgctcaacctgtccgagaacgcgacctacctggtcgaggacggcgagcaccagtcgatcctgagggttcaccggcaggactaccaccagccgcacgagatcgagtccgaactcgactggttggctgccctgcgcaccgacagcgatgtcacggtgcccacggtggtgcccgcg

SEQ ID NO: 16 - protein, 255 aa, Mycobacterium smegmatis MC2 155
MGVITDDVTIAQQALTHYDVSDNASLRLLNLSENATYLVEDGEHQSILRVHRQDYHQPHEIESELDWLAALRTDSDVTVPTVVPARDGRRVVTVDPADSDAVPRHVVHFEMVGGAEPDEESLTLDDFQTLGRITASLHEHSQRWTRPAGFGRFSWDWEHCLGDTPRWGRWQDAEGVGASETALLTRAQDLLHRKLEEYGSGPDRYGLIHADLRLANLLVDSSTPQRTITVIDFDDCGFGWYFYDFGTAVSFIEHD

SEQ ID NO: 17 - DNA, 780 bp, Mycobacterium smegmatis MC2 155
atgttcacctctcttgagggccgatcggccatcgtcaccggcggcagcaagggcatcggccgcggtatcgccgagaccttcgccaacgccggtgtcgacgtcgtgatcaccggacgcaaccaggacgacctcgaccgcacggtcgcggacctctcaggcacgcgcggcaaggtcaccgcggtgcgcgccgacgtcaccgaccccgaggacgcccgccgcacggtcgccgagaccgtttcgcgccacggcggactcgacatcgtgtgcgccaacgcaggcatcttcccgtccggccggctcgaagacctcacccccgacgacatcgagcaggtcctcggcgtcaacttcaagggcaccgtctacatcgtgcaggccgcgctgcaggcgctgaccgcaagcggtcacggtcgcgtcgtcgtgacgtcgtcgatcacgggtcccatcacgggatatcccggctggtcgcactacggggccagcaaggccgcccagctcggcttcctgcgcaccgcggccatggagctcgcgcccaagaagatcacgatcaacgcggtgctccccggcaacatcatgaccgagggcctcgacgaaatgggccaggactacctcgaccaaatggcgtccgccatcccggccgggcgcctcggatcggttgccgacatcggtaacgccgcgctgttcttcgcgaccgacgaggcggcctacgtcacgggacagaccctggtcgtcgatggtgggcaggtactgcccgaatcgcacctcgcgatcgccgagttgtag

SEQ ID NO: 18 - protein, 255 aa, Mycobacterium smegmatis MC2 155
MFTSLEGRSAIVTGGSKGIGRGIAETFANAGVDVVITGRNQDDLDRTVADLSGTRGKVTAVRADVTDPEDARRTVAETVSRHGGLDIVCANAGIFPSGRLEDLTPDDIEQVLGVNFKGTVYIVQAALQALTASGHGRVVVTSSITGPITGYPGWSHYGASKAAQLGFLRTAAMELAPKKITINAVLPGNIMTEGLDEMGQDYLDQMASAIPAGRLGSVADIGNAALFFATDEAAYVTGQTLVVDGGQVLPESHLA

SEQ ID NO: 19 - DNA, 780 bp, Mycobacterium smegmatis MC2 155
gtgccagtacagagcgaggagttgcgacgccgtctggtcgccgacatcaacgcgggaaccccgggcgccaagctcggcagcgaacgcgacctcgccgagaagtacggcaccagccgctcgagcctgcgccaggtactggccgctctggaagaggccggcctggtccaccgcgtgatcgggcggtccggcggcatcttcatcagccacggccaggtggaacgcaacctctcggatgtggtgggcgtacccgccttcctggccaaccagggatatgtggcgggcacccggatcctgtcgacccgcatcaccacgcccgaccagaccacccgtaccgcgctgcgtctcgggccgggagagtacgtcgtcgagatccagcgtgtgcggttggccgacgggtccccgatatcccttgagcaggcgcagtttccggccgagaagtttccgggtctgctcgagcagcagctcggcggatcgctctacgaggtcctcgaatcgcagtacggtctggtgcccggccgtgccgacgagcgcatcgaagccgtcaacgccacgagcaacgaggccaccctgctgggcatcaagcccaaggccgcgcttctgctgatcacgcgcgtcaccttcgatcagaccggcacaccgtacgagttctcgcgcgatctgttccgcggcgaccgcaccgcgctcgcggtgaccgcgaaaggccgcggtatcgcggccgcgtcgaacagcggcaccgacaaccgcacggcctcggtgacgctgcaccgtcaggtcggctga

SEQ ID NO: 20 - protein, 255 aa, Mycobacterium smegmatis MC2 155
MPVQSEELRRRLVADINAGTPGAKLGSERDLAEKYGTSRSSLRQVLAALEEAGLVHRVIGRSGGIFISHGQVERNLSDVVGVPAFLANQGYVAGTRILSTRITTPDQTTRTALRLGPGEYVVEIQRVRLADGSPISLEQAQFPAEKFPGLLEQQLGGSLYEVLESQYGLVPGRADERIEAVNATSNEATLLGIKPKAALLLITRVTFDQTGTPYEFSRDLFRGDRTALAVTAKGRGIAAASNSGTDNRTASVTLH

SEQ ID NO: 21 - DNA, 255 bp, Verminephrobacter eiseniae EF01-2
atgactgcatacatcaatcaggaagcagcggcaaagctcgatgaagtctttccccttgcagaattggcgctcaaggcctatgggccagagtttcagggtgaactcagcctgctgacacactctgaaaattcgacctatctggtgaacgcattttcagggcagcgcttcgtaatgcgcgtgcatcgtgcgcactaccacagcagaacggccattgaaagcgagttggcatggctggatgcactggccgatgaaggc

SEQ ID NO: 22 - protein, 255 aa, Verminephrobacter eiseniae EF01-2
MTAYINQEAAAKLDEVFPLAELALKAYGPEFQGELSLLTHSENSTYLVNAFSGQRFVMRVHRAHYHSRTAIESELAWLDALADEGMEVPKAIAGRDGAKVQTIGDGHAERREVVLFHWINGYQPDQSQQESLIQGFRRLGEITAGLHIHARQWQRPHWFERRLMVGAHAAWGNWQKAPYLDKPGAAIIGKALDKVRMELNEYGNAADLFGLIHADLRLTNLLVEEEITRIIDFDDCGFSWFMHDLAAAVSFIEHS

SEQ ID NO: 23 - DNA, 777 bp, Verminephrobacter eiseniae EF01-2
ttggcaacgcaatcacgcaaatcccggcgacaggaacagatcctggaaaccctgttgttgaacccgacgcagcgtgtgcaccagttggcgcagacgctgcgggtctcggccgagactgtgcggcgcgatctcgctgaattggctgaaggcggaaagctcagccgcacctatggcggcgcgttgcggacgcagcaattcgaaccggcgttgtctgagcgcctgctgctgaaggtgcgggaacgccaggccattgcccgccaagcggcgcagcggttgggcaatatggacgttctgatgattggtggtggcgccacgacacttcatttcgcccgggccatccgacgactcaatcaccccatgacggtgattacaccggcctacagcgttgcgcaggagctttcgcgcaacccttgctttgaagtgatgtgcctgccgggtatctttgaaggaaaggaaggtctggtctgtggccccgaggcgatcaaggcgattgagcgctttcatgtgccggtcgctgttctgggcgcctctggcgtgagccgtgagggtgtcagtgaagccttgctgagtgccgggcaggtctaccaagccatcatggccaattcggaccaagtgtttgtgttggccgacggctcgaagttcaacaagcgtgccctgacgctattgggcacctggcaatccaatatcacactggtaaccgacgttcaaccgtccggggaactgcaaacggcgatttcccagggcagagtgctggtcgaagtggcaacgctcgaatga

SEQ ID NO: 24 - protein, 258 aa, Verminephrobacter eiseniae EF01-2
MATQSRKSRRQEQILETLLLNPTQRVHQLAQTLRVSAETVRRDLAELAEGGKLSRTYGGALRTQQFEPALSERLLLKVRERQAIARQAAQRLGNMDVLMIGGGATTLHFARAIRRLNHPMTVITPAYSVAQELSRNPCFEVMCLPGIFEGKEGLVCGPEAIKAIERFHVPVAVLGASGVSREGVSEALLSAGQVYQAIMANSDQVFVLADGSKFNKRALTLLGTWQSNITLVTDVQPSGELQTAISQGRVLVEVATLE

SEQ ID NO: 25 - DNA, 1424 bp, Verminephrobacter eiseniae EF01-2
atgacgatggcgactgccgcgcccattactgcaatggtcggaaacgttccgatagctgtcggatttggcaatggcgccaatgcgccggcaggttacatggtggcaactgttttattgacgctgttctccgtgggctatgtggaaatggccaagcacatcacgtcgaccggggctttttacggtttcatttcccatggcctggggcgcgtagtgggtttggcatccggagttgccgtgacttggacctacatgatttttgaggctgcgctggttggcatttttgcgttcttttgcgctgatttactcggttcattgttggggttgcgggtggattggatatttcttgctgcactcatgctgctggtcaacgggatattgtgtcatttcgacatagagttgacttccagagtcctgggcattgccctggttctggaaattgcgatgctgctcctgatggctgtcgccgtactgtttcatggcggcggcgcacaaggcatgtcctgggagtccatcaaccccgtcaatgcattcaaggcagccgaaggaattcccaaggctacggcggggattggtctgttttttgccttctggtcctgggtcggatttgaatcttccgccatgtatggtgaagaatcgcgaaacccgaagaaaataattccccaggccaccatgatttcggtcatcggcattggtgcgctctacacatttgtttcgtggatggccatcgccggaacaggtgccgccgagtcggtaaggctggcacaaaacccggcgaccgggtctgaaatattttttaccccgacgcgggttcttctgggcgactgggcagtgatcgtattcaaaatcctgttgatttccggctcctttgcctgtggcatggcattccacaactgcgctgcccggtacagctttgccttgggcagagaaaaactattcgcagtctttggcagcacggttggccgttcccacgagatacatgggtcgccatacattgcttcgtttgtccagacattgtttgccagcacattggtcctcgttttttggctgatgggcaaggatccttatgctgacttgtatgcggtgttggcaattttgggaaccatggccatcatgatcgtgcagacattgtgcgcattttctgtcattgcatattttcattttggtggaaatgagtccagaagacatgcgcactggttcaaaacttttgtggcacctctgattggggtgtcggaatgatttatgtcactcatttgttatggataaacaaggaatttgcagcgggtgattccgccacatcgttgttgtttcggttgatcccatggctggttgccgccagtttcctgaccggggcgtgcatcgccttgtacttcaaatattttgacaaagataaatatgacatcattggcagaattgtcctgaagtga

SEQ ID NO: 26 - protein, 474 aa, Verminephrobacter eiseniae EF01-2
MTMATAAPITAMVGNVPIAVGFGNGANAPAGYMVATVLLTLFSVGYVEMAKHITSTGAFYGFISHGLGRVVGLASGVAVTWTYMIFEAALVGIFAFFCADLLGSLLGLRVDWIFLAALMLLVNGILCHFDIELTSRVLGIALVLEIAMLLLMAVAVLFHGGGAQGMSWESINPVNAFKAAEGIPKATAGIGLFFAFWSWVGFESSAMYGEESRNPKKIIPQATMISVIGIGALYTFVSWMAIAGTGAAESVRLAQNPATGSEIFFTPTRVLLGDWAVIVFKILLISGSFACGMAFHNCAARYSFALGREKLFAVFGSTVGRSHEIHGSPYIASFVQTLFASTLVLVFWLMGKDPYADLYAVLAILGTMAIMIVQTLCAFSVIAYFHFGGNESRRHAHWFKTFVAPLIGGVGMIYVTHLLWINKEFAAGDSATSLLFRLIPWLVAASFLTGACIALYFKYFDKDKYDIIGRIVLK

SEQ ID NO: 27 - DNA, 696 bp, Verminephrobacter eiseniae EF01-2
atggccaaggtgtttggtcgccagcaagccaaggtggccatcaccgggcgcactcctgacaaggtgaaaagcgtagcgcaacgactcggtgcacaggggatgctcgtgcgtggtttcgttggcgatgtagcgaacgcggcggcagtttcgaccctgatggaagaagtagcgaaagcccaagggggaatagatatcctgtgctgtaatgccggtgtatttccgagcgcagcccttggcaatatcagcgcagccgattgggatttggtactcgacaccaatgccaaaggctgctttttatgcgtgcagtctgcattgccctatcttcgccaggcagaatatggtcgaatcattttgacctcatccatcaccggaccggtcaccggatatccgggatgggcacattacgctgcaagcaaggctgcgcaattgggattcatgcgtactgcggccatcgaactggcgcaggacaatatcacgatcaacgccgtattgccaggaaacatcctgacggaaggtttggcggaaatgggccgtgattatatatccagcatggcggcatccattccgctgaaacgcctgggtgcagtagaagacattggaaatgcagcgctcttttttgcctcccgggaggccgggttcattacggggcaaacgctcatcgtggatggcggacagacattgcccgaatcattgtaa

SEQ ID NO: 28 - protein, 231 aa, Verminephrobacter eiseniae EF01-2
MAKVFGRQQAKVAITGRTPDKVKSVAQRLGAQGMLVRGFVGDVANAAAVSTLMEEVAKAQGGIDILCCNAGVFPSAALGNISAADWDLVLDTNAKGCFLCVQSALPYLRQAEYGRIILTSSITGPVTGYPGWAHYAASKAAQLGFMRTAAIELAQDNITINAVLPGNILTEGLAEMGRDYISSMAASIPLKRLGAVEDIGNAALFFASREAGFITGQTLIVDGGQTLPESL

SEQ ID NO: 29 - DNA, 627 bp, Verminephrobacter eiseniae EF01-2
atgaccgaacttcgggtctatctgctcatcgaggccctgcagccccagtttgcggcttgcctgtcttcgcccacacgggcccggggctaccctgcgtttgccgggcaaagctcgctcatcattgaagtctcgccggcactggccattcatcgggtgaccgacctggccttgaagtcggcaccggcgatggagcccggcattctgtacaccgagcgccagttcgggttattggaacttcacgccgacagcctggaaaagctcaacgcggcagggcaagccatcctcgacggcatgggcgccaagcccgaggatcagctcaagccgcaaatcctctatcacgacatcattgaaaacctctcggatcagcacgccatcatcctgaatcgatcgcgtgaagcctcgattctggtgcccggcgtagccttgctgatctacgaaatggcgcccgccttgtttgcctgtgttgcggccaatgaggcagagcgcgcggttccccgcgccgtcatcaacgatgtgcagatgatgggggcgacgggacgggtattcatgtccggcagcttggccgaaatgcgactggcacgggaaacgatcaccgccaagctggaatccattcccggtcgccaatga

SEQ ID NO: 30 - protein, 208 aa, Verminephrobacter eiseniae EF01-2
MTELRVYLLIEALQPQFAACLSSPTRARGYPAFAGQSSLIIEVSPALAIHRVTDLALKSAPAMEPGILYTERQFGLLELHADSLEKLNAAGQAILDGMGAKPEDQLKPQILYHDIIENLSDQHAIILNRSREASILVPGVALLIYEMAPALFACVAANEAERAVPRAVINDVQMMGATGRVFMSGSLAEMRLARETITAKLESIPGRQ

SEQ ID NO: 31 - DNA, 285 bp, Verminephrobacter eiseniae EF01-2
atggcaaatctggcgattggaatgattgaaaccaaaggctatgtgccagcactgtctgccgccgacgcgatggtcaaggcagccaatgtcgaaatcattgcacgcaatgaagtcggcggcggactggtgtccgtggtggtgcgtggcgatgtgggcgccgtgaaggcggcgacggaagccggcgctgaagctgcagggcagatcggcgaagtcacagccgtccatgtgattgcgcgtccgcaccccgacctggccaaacacttcgaagcgctgaacgccaagtga

SEQ ID NO: 32 - protein, 94 aa, Verminephrobacter eiseniae EF01-2
MANLAIGMIETKGYVPALSAADAMVKAANVEIIARNEVGGGLVSVVVRGDVGAVKAATEAGAEAAGQIGEVTAVHVIARPHPDLAKHFEALNAK

SEQ ID NO: 33 - DNA, 285 bp, Verminephrobacter eiseniae EF01-2
atgatacgtgcacgcgtgaacggcaagctctggtctaccaggcatctggactccttgcccgtgggcgcgttgctggaggtcgagaccgaatccggggccaaactgattgccttcgacccgttgggttgcgccgagggcgaatcggtcttggtcacacagggatcggtggcggcggcctattttccgaaccgccctgtgcccattgacgccctgatcattgggtctatcgatgaggtcggcacgagcagcattggaaaaaccaaatcacgggagagccttgcatga

SEQ ID NO: 34 - protein, 94 aa, Verminephrobacter eiseniae EF01-2
MIRARVNGKLWSTRHLDSLPVGALLEVETESGAKLIAFDPLGCAEGESVLVTQGSVAAAYFPNRPVPIDALIIGSIDEVGTSSIGKTKSRESLA

SEQ ID NO: 35 - DNA, 447 bp, Verminephrobacter eiseniae EF01-2
atgtcagagttgcgcgcgctcatccgcgaaattctggtggaagaattggccgcactgcgtgcagcgccggccgccacacccgcctgtgaaatggtggatgtgcacagcgatgaggctttgatggcattcgcacgcgatctgttggggcgcgcgaacgacccggaatttgtgcgctgcgtccagtccggccagcaccgcttcacgctcgcgcccaccgtggcgcagccaccgggtcagcggcccgcgcccgccgcttcgttcaccctggtggcgtcggcccccgcagaggcgccgcgctttgaaaaagccttggtcaccgaacgcgatgtcgccgccattccaagagaccaaagccgcatccggctggccaggaacacccggctgacgccgttggccagcgacgaacttcggcgccgtggcatacgcatcgaaaggactcagaaatga

SEQ ID NO: 36 - protein, 148 aa, Verminephrobacter eiseniae EF01-2
MSELRALIREILVEELAALRAAPAATPACEMVDVHSDEALMAFARDLLGRANDPEFVRCVQSGQHRFTLAPTVAQPPGQRPAPAASFTLVASAPAEAPRFEKALVTERDVAAIPRDQSRIRLARNTRLTPLASDELRRRGIRIERTQK

SEQ ID NO: 37 - DNA, 612 bp, Verminephrobacter eiseniae EF01-2
atgaccgatctacgcgcttgcatcttcatcgatcagctacagccgcagaccctggcctacatgtcgacctggatgcgtggcaccttgccgcgcgccaagatggccgcccaaatcgttgaaatggcccccggtctcgacattgaagcgctgaccgacgtggtgctcaagagcgccgatgtgcgcgcgggcgtgctcgtggtggaacgccagttcggcaccttgcagtttcacgcctactccgccgccgaagtccatgctgccgcagacgccgtgctgcgcagcctcgacaaacgccaggaagaactggctgcgccagccatccaagcctccaggatcgtcacccgcatcgatgatcagcatgcctatctgatgaaccgcaacaagatgggctccatggtgctgggcggcgaaagtgtgtacctgctggaatgccagcccgcagcgtttgccatcctggcctgcaacgaggccgaaaaggccgcctgcatcaaagtggtggacctgcgcatgatcggcgccagtggccgcctgtacctggcgggcacgcaagccgacgtcagaaatgcgcgcgacgcggctgagacggccctgcgcgcagttggagccgtctga

SEQ ID NO: 38 - protein, 203 aa, Verminephrobacter eiseniae EF01-2
MTDLRACIFIDQLQPQTLAYMSTWMRGTLPRAKMAAQIVEMAPGLDIEALTDVVLKSADVRAGVLVVERQFGTLQFHAYSAAEVHAAADAVLRSLDKRQEELAAPAIQASRIVTRIDDQHAYLMNRNKMGSMVLGGESVYLLECQPAAFAILACNEAEKAACIKVVDLRMIGASGRLYLAGTQADVRNARDAAETALRAVGAV

SEQ ID NO: 39 - DNA, 1602 bp, Verminephrobacter eiseniae EF01-2
atgagaaagatgcacgagttcatgcagcaagaacaagccagactggtggtgcccgatcaggacctcgcttgcgggctgctccagctcgatcgcgccgaatgggcggccagggactttgcccaattcgaccgtgagcaggtgcttcgggttgccgaggccgttgccaaggcggctcatgacaacgcggcgttttacgccgaatgggcggtgcgggaaactggctacggggtggtcgagcacaaacaaaaaaagaacgagtcggtcgcttacccgttgctggacttctatcgcgacctcgacttggtacacccccgcgtggacgaagcccgcaagatggtcgagattcccaaacctgcgggcatcgtgttggcgctgacacccgccaccaaccccgttgcgaccgtgtactacaaggtcatgctggcgctgctcagtcgcaacgccatcgtgatcagcccgcaccccgcagccagtcgatgctgcaatgacgcggccagaaaactcgacgctgcggcgcatgcggcaggcgcccccccggggctcatccagtgcatagaaaggccgagcatcccgctggtcgacaccttgatgcgctcgccccaggtggccgtggtgatggctaccggcggcggccccatggtgagggcggcgtattcgtcgggaaacccggccatcggcgtcggccccggcaatgcgcccgcctacatcgataccagtgccgacatgcgcaaagcggcacgcatgattgtcagcagcaagagcttcgacaattcggtgctgtgcaccagcgagagcgtcttgctggtccagcaaaaggacgcccagcgtttcgagcgcgaactgcgtgctgccggcgcacacctgtgtcaggagcgcgaggtcgaacgcttgcgcgcttacctcttcccggacggcgacctgaaccccgccgcaattggcaaaagcgccgtgtggattgcccgcgaggcgggtctgaaagtgctgcctgccacccaggtgttggtcgccaacgtgcagcacatcggcgtcgacgagccactcaccaaggaaaaactgtgcccggtgctggcgctgtatgcagtcgacagcttcgagcgtgcgacccggtcggcgcaaatgatcttgcgtctgtcgggcgccggccactcggccgcgtttcatggcaacgacccgcaaaaggccctggacttcgcagcccggctcaacgtgtaccgcgtggtggtcaacgcgccttgcgcgcaaggcgcgtccgggtttgccacccacctgccaccaaccttcatgatcggcacgggctatttcggccgctcctgtgtgggtgagaacgttggcccccagcatctggtgcactggacccggctggcctacaacaaggacatgtcggaagtcttcggcgattaccgccatttgcgcgtcacggcgcccgcaacgggcaagacccgcagcaccgcagcaacccaagcggcgccggcgcgagttcaaccaccgctggctgccgggacgttgcccacgcctgaagccgcaggccagggcatcgatcgcgacttcctgcgccagttgattgcgcaagagctgcgcgaactgggtagaggccacagatga

SEQ ID NO: 40 - protein, 533 aa, Verminephrobacter eiseniae EF01-2
MRKMHEFMQQEQARLVVPDQDLACGLLQLDRAEWAARDFAQFDREQVLRVAEAVAKAAHDNAAFYAEWAVRETGYGVVEHKQKKNESVAYPLLDFYRDLDLVHPRVDEARKMVEIPKPAGIVLALTPATNPVATVYYKVMLALLSRNAIVISPHPAASRCCNDAARKLDAAAHAAGAPPGLIQCIERPSIPLVDTLMRSPQVAVVMATGGGPMVRAAYSSGNPAIGVGPGNAPAYIDTSADMRKAARMIVSSKSFDNSVLCTSESVLLVQQKDAQRFERELRAAGAHLCQEREVERLRAYLFPDGDLNPAAIGKSAVWIAREAGLKVLPATQVLVANVQHIGVDEPLTKEKLCPVLALYAVDSFERATRSAQMILRLSGAGHSAAFHGNDPQKALDFAARLNVYRVVVNAPCAQGASGFATHLPPTFMIGTGYFGRSCVGENVGPQHLVHWTRLAYNKDMSEVFGDYRHLRVTAPATGKTRSTAATQAAPARVQPPLAAGTLPTPEAAGQGIDRDFLRQLIAQELRELGRGHR

SEQ ID NO: 41 - DNA, 1286 bp, Verminephrobacter eiseniae EF01-2
gtgttcgattacgggtttttccgctttgagagcaaagaggatttgtacgccaaggctgcggcgttctggaatccgggcaaggtcaagctctggcgtgatgctggcactgacctggtcatcgaccggcgtgaaggctactttctgtacgacatgtcaggcaagcgcctgatcgacctgcatctgaacgggggcacctacaacttcgggcaccgcaacccggaactggtggccacgctgaagtctgcgctcgactacttcgacatgggaaaccattggtttccctctgtcgcgcgggctgcttttgctgaaaaactggtgggcacggctcccgggatggactacgccttgctcggcgccggtggcgccgaagccgtggaaatcgcgatcaagtctgcccgatttgccacacaacggcgcaagatcgtgtccatcgtcaagggctaccacgggcattcggggttgtccgtggccaccggcgatgagcgcttttccaagatattcctttccgatcggcccgatgagttcagccaggttcctttcaacgacctcgacgcgctggaagcggtgctgcgcaagcgcgatgtggcggctttcatcatcgagaccatccccgccacctacggctttccgatgcccaaggatggctatctgcaagcctgccaaaacctgtgccgcaagtacggcgcgatgtacatcgccgatgaggtccagaccggtttgatgcgcaccggaatcatgtgggggtggcagtcctacggattgcagcctgacatgtttgtcacggccaagggcctgggcgggggcgtctaccccatcagcgcctgcgtggccaccgagcagtgcgcggcttggcagaagcaggatggcgcggcccatatcagcaccgccggcgggtcggaactggggtgcgtggtcgcctatcaagtcctgaacatgctggagcggcctgcgctcgtctccaacgtgcattacgtcgccgagttcttcgcgcaagcctttgcgcaatcgatggcggtgcacagcgatatctttgtcggggtgcgccagcgcggcgtcattctggggctggaattgatcatcccgagggcgcggtggcggtgtcacgggcgctgtatgagcacggcatctgggccatcttctcgtcgctggacaagcgggtgttgcagttcaagccgggggtcttgttgacggcgccgttgtgccaggaaatcgtcgatcgcttcgacgctgcgatgccgcgtgcgcgcgagctgctgcgcaacgcgcggcgagaggctcaggcatga

SEQ ID NO: 42 - protein, 428 aa, Verminephrobacter eiseniae EF01-2
MFDYGFFRFESKEDLYAKAAAFWNPGKVKLWRDAGTDLVIDRREGYFLYDMSGKRLIDLHLNGGTYNFGHRNPELVATLKSALDYFDMGNHWFPSVARAAFAEKLVGTAPGMDYALLGAGGAEAVEIAIKSARFATQRRKIVSIVKGYHGHSGLSVATGDERFSKIFLSDRPDEFSQVPFNDLDALEAVLRKRDVAAFIIETIPATYGFPMPKDGYLQACQNLCRKYGAMYIADEVQTGLMRTGIMWGWQSYGLQPDMFVTAKGLGGGVYPISACVATEQCAAWQKQDGAAHISTAGGSELGCVVAYQVLNMLERPALVSNVHYVAEFFAQAFAQSMAVHSDIFVGVRQRGVILGLEFDHPEGAVAVSRALYEHGIWAIFSSLDKRVLQFKPGVLLTAPLCQEIVDRFDAAMPRARELLRNARREAQA

SEQ ID NO: 43 - DNA, 255 bp, Verminephrobacter eiseniae EF01-2
gtgtttcggcgtgcgcgcccattgcgcaaaaccacacgaatcaatgggttggagcgcaatggattgaagcgctccggtcggggatggaatgcgccgggtgcagatgttcttgcccgtcattgcccgctattacccggcagggccgatgccatcggccgtggccggctgatcgttgccacctggccgaagtccgccgcaaagcagcgccagaacgtcccgccagcccgctcacgcacccgctggcgcagcatgtcg

SEQ ID NO: 44 - protein, 189 aa, Verminephrobacter eiseniae EF01-2
MFRRARPLRKTTRINGLERNGLKRSGRGWNAPGADVLARHCPLLPGRADAIGRGRLIVATWPKSAAKQRQNVPPARSRTRWRSMSSCHRSGPQKRGRDSGAVTAVTGAPNGQATAFVSLNDEVDAVAAAANLWVRAKSPLHGHAEHLRCEARLATFGARRQRQRVRGRARPECPRRRRSAMADMPPSAP

SEQ ID NO: 45 - DNA, 780 bp, Rhodococcus sp. RHA1 plasmid pRHL2
gtgcgttctatgactgagggtgacaagagcaaggatcgaacactctccaccggcggatctaccgaggagattgtcggctccatacaatccataatcaccgaccgctcattggcgccaggtgatcgaatcggagccgaacgggaactcgcgcagagcttgggggtgagtcggtggaccattcgcagggcgctcgagcaactcgagtcccagggacggattctccggactcacggtcgcagtgggggcatcttcgttgcaccgaaaaagctgatccgcacgacaccgctcgggggtctacccgtatatctacgggcgcagggaattgattccgggacaacggtcctagggacccgtgcggggccgcccgacgatgagatcgcaaagcagctggggctagagtccgatgcctgggtctttcacatcgagcggcttcgatttgcgggtgggctacccctcgttctggagacgacggatttgccatgcgatctctttccaggacttctcgatcagccactcggatcgctgtacgagattctcgattcaaagtatgacatccggccagaagtgaccgtcgaaacgatcacagcgacgaccgctgagcgtgaggttgctggactgctgcaggtcgccgtagggtctgctctgatattcgtcacccgaactgcagagctcgggagtgggcggacgttcgaattttcgagagagctgtggcgagctgaccggacggccatcacagtacgcagcgacgggaaacctgcgtacacgaccatcgacgcgtga

SEQ ID NO: 46 - protein, 259 aa, Rhodococcus sp. RHA1 plasmid pRHL2
MRSMTEGDKSKDRTLSTGGSTEEIVGSIQSIITDRSLAPGDRIGAERELAQSLGVSRWTIRRALEQLESQGRILRTHGRSGGIFVAPKKLIRTTPLGGLPVYLRAQGIDSGTTVLGTRAGPPDDEIAKQLGLESDAWVFHIERLRFAGGLPLVLETTDLPCDLFPGLLDQPLGSLYEILDSKYDIRPEVTVETITATTAEREVAGLLQVAVGSALIFVTRTAELGSGRTFEFSRELWRADRTAITVRSDGKPAYTTIDA

SEQ ID NO: 47 - DNA, 282 bp, Rhodococcus sp. RHA1 plasmid pRHL2
atgagtgatgcaatcggcatgatcgaaacccgcggctacgtcgcttcccttgcggccgccgacgccatggtcaaagcggccaacgtcaccctgatcggtcgcgcagaggtcggtgacggactcgtcgccgtcatcatcaacggcgacgtcggtgccgtgaaggcagccaccgaggcaggctcggaaaccgccgccaccattggtgagctcgtctccgtccacgtcatcccccgaccccacgccgacctcggcaagcacttcaccgtcaacggaaaccagtaa

SEQ ID NO: 48 - protein, 93 aa, Rhodococcus sp. RHA1 plasmid pRHL2
MSDAIGMIETRGYVASLAAADAMVKAANVTLIGRAEVGDGLVAVIINGDVGAVKAATEAGSETAATIGELVSVHVIPRPHADLGKHFTVNGNQ

SEQ ID NO: 49 - DNA, 267 bp, Rhodococcus sp. RHA1 plasmid pRHL2
atgatcaaagcgactgtcctcggccctgtatgggcgaccaagcggctcgacggctttccgtccggagcgctgctcgaggtgcagcgagatgagaccgccgagcgttacgtggccttggaccatctcggaagcggcccgggtgatcacgtgttggtcgccctcggcagcgctgtagcacaccacctccccggcagcaccccggccgatgcgctcatcatcggagtcatcgacccccccgcgccttcagcaacacccaacccacaatga

SEQ ID NO: 50 - protein, 88 aa, Rhodococcus sp. RHA1 plasmid pRHL2
MIKATVLGPVWATKRLDGFPSGALLEVQRDETAERYVALDHLGSGPGDHVLVALGSAVAHHLPGSTPADALIIGVIDPPAPSATPNPQ

SEQ ID NO: 51 - DNA, 438 bp, Rhodococcus sp. RHA1 plasmid pRHL2
atgacatcggcacccgcgctcgggctgcgcgctctggtgcgtgagctgatcagcgagatcattccccagctgaacctcctgactcggccccagcgggtggtgatcaccgacgacgagcagctcaacggcttcgtccgccgggtcgtcacgacactcgatgacccggtcaccgggccgttgctgcgttccgggcagctttgtttccagctcgacaccgcaggcaacggtgcggcggccgtttcgtcgcccacagcacctgccgccgaggggcaggcgaccgacagcatcgagatcgacaagggggtgttgaccgagcgcatcgttgcccgtgccatcaccgagcgggctcggctcgttctcggccggacggtggtcatcactccgcttgcccgcgaacagatccggaaatcgtcggtcgaggtggtgcggcgaccatga

SEQ ID NO: 52 - protein, 145 aa, Rhodococcus sp. RHA1 plasmid pRHL2
MTSAPALGLRALVRELISEIIPQLNLLTRPQRVVITDDEQLNGFVRRVVTTLDDPVTGPLLRSGQLCFQLDTAGNGAAAVSSPTAPAAEGQATDSIEIDKGVLTERIVARAITERARLVLGRTVVITPLAREQIRKSSVEVVRRP

SEQ ID NO: 53 - DNA, 606 bp, Rhodococcus sp. RHA1 plasmid pRHL2
atggctgatctgcggtcgttcattttcatcgacaagttgcagcctcagacgatgtgttatctgggcacctttgttcgcggtagtttgccgcggacgaatatgtcggcgcaggtgatcgagatcgctccggggctggatatcgagccgttgacggatgttgctctgaagcatgcgcaggtcagggctggcatgttggtggtggagcggcagttcgggtacctcgagattcattcgcgttcggcggatgctgtgcggttggcggctgatgcggtcctcgatgcgttgggtgcttcggagaccgaggcgcgtccaccggaggtgatcgcgtcgaagatcatttccaatgtcgatgacgagcatgcttttttggtcaaccgcaacaagtccgggtcgatgctgctgcccggtgattcgttgttcgtgatggagatgcagccggcgtcgtacgcgatcctggcgacgaacgaagccgagaaggccagtccgatcaaggtcgtcgactatcgcatgatgggcgcctccgggcgtgtctatctggccggcgacgaggacgcggtacggaccgcggctgatgccgccggggcagcgttggagatgcggcgatga

SEQ ID NO: 54 - protein, 201 aa, Rhodococcus sp. RHA1 plasmid pRHL2
MADLRSFIFIDKLQPQTMCYLGTFVRGSLPRTNMSAQVIEIAPGLDIEPLTDVALKHAQVRAGMLVVERQFGYLEIHSRSADAVRLAADAVLDALGASETEARPPEVIASKIISNVDDEHAFLVNRNKSGSMLLPGDSLFVMEMQPASYAILATNEAEKASPIKVVDYRMMGASGRVYLAGDEDAVRTAADAAGAALEMRR

SEQ ID NO: 55 - DNA, 1506 bp, Rhodococcus sp. RHA1 plasmid pRHL2
atgcagcaagattcgatcgccaagccgaaactgaccgagattgtcgcgttgaacactctcaacgccgacaaactttcctcgcttgacagccaaacacgtgagctggttgagcgtcgccagcgtgtcatggggcccgcataccggttgtcctacgaggagccgttccaaccgattcgtgcacaaggcacgaaaatcatcgatgtttacggccacgaatacctcgatgcgtacaacaacgttgccagcgtcggtcacaaccatccgcatgtcgtcgatgctgtctgccgacagcttcgcctgatgaacacgaacacccggtacctgcagcgcgacatcgtcgactacgccgaaaatctcgtgagtacacatgacagcgcgttggacaacgtcatgttcacttgcacggggtccgaggccaacgacctcgctgtgcgcatcgcacggacggtaaccggcggcacaggtgtcatcgtctccgagtacgcctatcacgggtgtacgcgggacgtcgcgtcctggtcaccgtcgtcgggcaagggcaccgtcctcggttcggatgtacggctcgtgcctcctccggatacgttcagagcggatcgtgccgaggccgaaacgaagtttttgagtagcctccaggctcagatcgatgacctgaaccgtcgaggtgtgcagttggccgccttcgtcgtcgacagcatgttctcttcggacgggatccaccccgatcccggggtgttgaaggccgcgatcgagttggtccaccgggccggcgggctcctcatcagtgacgaagtgcaatccggattcgggcgcaccggggaagccatgtgggggtaccagcgcagcaacatcgttgccgacctggtcaccatggggaagccgatgggcaatggcatgcccatcggaggggttgtggcgaaaagtgctctgctggagaaattttcgcgagaaacggcatacttcaacacgttcggtggcgagaacgcaccggtagcagccgcgcaggccgtgctggaggtaattcgcgacgaaaacttgatcgccaatgcccaggacaagggcggtcaattggtcgccgggattcgggaaatactcacccgcaataacttcgcggcggacgttcgaggagccggtctctacatcggagtcgagttcgtgtccgacttcgacacggcgatcccggacaccgagaccacactggcattcgtgaacggacttcgtcagcaccgggtcctgactagcacggcggggacctacggaaacgtgatcaaggtacgcccgccgctagtcctgagtcagtccgacaccgatcgactgctgaccgaattcgacaacgtggcgcgcgaattgcgccaaagcgcccgacctacgcccgagacaacgaccgattcaccctcggaccaggatccgtctggggttgggttgggtgatggtgcggtgcgtgaggagttgcgtcgtctgattgtcgaagagctgcgcgggctgattgggcagaatcatggctga

SEQ ID NO: 56 - protein, 501 aa, Rhodococcus sp. RHA1 plasmid pRHL2
MQQDSIAKPKLTEIVALNTLNADKLSSLDSQTRELVERRQRVMGPAYRLSYEEPFQPIRAQGTKIIDVYGHEYLDAYNNVASVGHNHPHVVDAVCRQLRLMNTNTRYLQRDIVDYAENLVSTHDSALDNVMFTCTGSEANDLAVRIARTVTGGTGVIVSEYAYHGCTRDVASWSPSSGKGTVLGSDVRLVPPPDTFRADRAEAETKFLSSLQAQIDDLNRRGVQLAAFVVDSMFSSDGIHPDPGVLKAAIELVHRAGGLLISDEVQSGFGRTGEAMWGYQRSNIVADLVTMGKPMGNGMPIGGVVAKSALLEKFSRETAYFNTFGGENAPVAAAQAVLEVIRDENLIANAQDKGGQLVAGIREILTRNNFAADVRGAGLYIGVEFVSDFDTAIPDTETTLAFVNGLRQHRVLTSTAGTYGNVIKVRPPLVLSQSDTDRLLTEFDNVARELRQSARPTPETTTDSPSDQDPSGVGLGDGAVREELRRLIVEELRGLIGQNHG

SEQ ID NO: 57 - DNA, 708 bp, Rhodococcus sp. RHA1 plasmid pRHL2
atgtcgacaccaactactacgaagcaggccgccgcaacgaagcgaagctcggcctcgtccgccgcacccgattcaggcacaccgtcgactgaactgcgcgtctaccttcgaatcgaaggactccagcgccagtttgcggccacgatggcgacaccgacccgggcccgcggctacccgccgaaagcgggcgatcattcgctcatcgtcgaagttgcgcctgcgttggcgatccagcgggtgatcgacgcggcgttgaaagcgactcccgaggtcgagccgggccttctctacgtggaacggcaatacggcatcctggaggttcacagccccagcgccgacgtcgtggaacaggccgggcaggcgatcctgaagaccctgaacgcgaaggcggaggatcaactcaaaccgaaaatcctctacagcgacatcatcgaggaaatcggcgaccagcacgccgtcatcctcaaccgcacccgggacgcgtcgatgctgatgccgggttccgctctgctggtgtatgagatggccccggcgctattcgctgccgtagcagccaacagtgccgaacgggtagccccgaacctgacactggtggacgtgcaaatgatcggtgcagcaggacgtctgttcatctcgggtgatctgaagagtgtcaccatcgcgcgcgaggagatcacgagagttctcgaggcggtgattggacgatga

SEQ ID NO: 58 - protein, 235 aa, Rhodococcus sp. RHA1 plasmid pRHL2
MSTPTTTKQAAATKRSSASSAAPDSGTPSTELRVYLRIEGLQRQFAATMATPTRARGYPPKAGDHSLIVEVAPALAIQRVIDAALKATPEVEPGLLYVERQYGILEVHSPSADVVEQAGQAILKTLNAKAEDQLKPKILYSDIIEEIGDQHAVILNRTRDASMLMPGSALLVYEMAPALFAAVAANSAERVAPNLTLVDVQMIGAAGRLFISGDLKSVTIAREEITRVLEAVIGR

SEQ ID NO: 59 - DNA, 282 bp, Rhodococcus sp. RHA1 plasmid pRHL2; identical to SEQ ID NO: 47

SEQ ID NO: 60 - protein, 93 aa, Rhodococcus sp. RHA1 plasmid pRHL2; identical to SEQ ID NO: 48

SEQ ID NO: 61 - DNA, 267 bp, Rhodococcus sp. RHA1 plasmid pRHL2; identical to SEQ ID NO: 49

SEQ ID NO: 62 - protein, 88 aa, Rhodococcus sp. RHA1 plasmid pRHL2; identical to SEQ ID NO: 50

SEQ ID NO: 63 - DNA, 438 bp, Rhodococcus sp. RHA1 plasmid pRHL2; identical to SEQ ID NO: 51

SEQ ID NO: 64 - protein, 145 aa, Rhodococcus sp. RHA1 plasmid pRHL2; identical to SEQ ID NO: 52

SEQ ID NO: 65 - DNA, 606 bp, Rhodococcus sp. RHA1 plasmid pRHL2; identical to SEQ ID NO: 53

SEQ ID NO: 66 - protein, 201 aa, Rhodococcus sp. RHA1 plasmid pRHL2; identical to SEQ ID NO: 54

SEQ ID NO: 67 - DNA, 1491 bp, Rhodococcus sp. RHA1 plasmid pRHL2
gtgagaacaccagaattcgaccgctcgccggagctcgacaccgtgctcgaccgggcgcaagttgcggcgacagcgttcgaggcctacgaccgatctcaggtcgaccgcatcgtgcgggcggttgcgaacgttgcactccagaacgctcgacagctcgccgagaaggctgcggacgagaccgggttcggtgtggccgaagacaaagtagcgaagaacgaagcagtctcgtccggcttcgtgcgtgaatacggcgacctggattttgtcagtcaccgtgctgacaacgaaaagaaactgctgctcagtcccaagccggcgggagtgatcttcgcggtcacaccctccacgagcccggtcgccaacctgtacttcaaggttctttcgtcgctgttgaccagaaacgccgtcgtcatcagcccccatccagccgccgtgcagacgagcctcgaggccgcccagctcctcagtcgcgccgccaccgaggcgggcgcaccggagggagcaatccagatcctgaacaagccatcggttccactgatcgaagcagcgatgggtgacgcgcgagtgaacctgatcctcgcaacaggaggctcggcggtcgtccgagccgcataccgatccggaacgcccgcgatcggagtgggccccggcaacgctgccgtggtggtcgatgaaacagcagacctggagcgagcggcggatcagatctcagcgtcgaaggcattcgacaattcagtcctctgcacggcggagtcggtcctcatcatggtcgagtcgatcgcctctcgaatgaatgagttgttggtccggcggggtgcacatctgtgccggcccgatgagacgcgacggctccgcaactacatgtaccccaaaggtaaattcaacaccgaggtcgtaggaaggcccgcgcgcgagatcgcgaaaaaagccgggatcaccgttgcggagggcacccaactattgctggctccgatcgacagcatccgtgatgacgagccgctcacccatgagaagttgagccccgtactggccgtgatgacggtttcaaacttcgaccaggcattggcggcggctgcctccctcgtcgacatcgtcggtgtcggccattcggcggtcatccacagcgaggacccgcagcacgtactcgactattcccaccgtctcccggttcaccgagttgcagtgaacatcggcggaagcctgggcaacgcgggcatcggcaccggacttccactcacgatgtcgatcgggacaggtttcgccggaggaagctcgctcggggaaaatctggcgcccgaacacctggtgcagtggaagcgtgcggcatatccggtgggcgccgtcttccctcagttcgcgtctctgcaacccacccgaggcgaccggtccggtgtgtctggggttgggttgggtgatggtgcggtgcgtgaggagttgcgtcgtctgattgtcgaagagctgcgcgggctgattgggcagaatcatggctga

SEQ ID NO: 68 - protein, 496 aa, Rhodococcus sp. RHA1 plasmid pRHL2
MRTPEFDRSPELDTVLDRAQVAATAFEAYDRSQVDRIVRAVANVALQNARQLAEKAADETGFGVAEDKVAKNEAVSSGFVREYGDLDFVSHRADNEKKLLLSPKPAGVIFAVTPSTSPVANLYFKVLSSLLTRNAVVISPHPAAVQTSLEAAQLLSRAATEAGAPEGAIQILNKPSVPLIEAAMGDARVNLILATGGSAVVRAAYRSGTPAIGVGPGNAAVVVDETADLERAADQISASKAFDNSVLCTAESVLIMVESIASRMNELLVRRGAHLCRPDETRRLRNYMYPKGKFNTEVVGRPAREIAKKAGITVAEGTQLLLAPIDSIRDDEPLTHEKLSPVLAVMTVSNFDQALAAAASLVDIVGVGHSAVIHSEDPQHVLDYSHRLPVHRVAVNIGGSLGNAGIGTGLPLTMSIGTGFAGGSSLGENLAPEHLVQWKRAAYPVGAVFPQFASLQPTRGDRSGVSGVGLGDGAVREELRRLIVEELRGLIGQNHG

SEQ ID NO: 69 - DNA, 2520 bp, Ruminococcus obeum ATCC 29174
atgtttaataccacagatgttccaaagtcatccaggattccgaaactggttgaggcactttatgccaatatgccggtaatcgagtctgccagagcgaagctgcttactgaatcatataaggctaccgaaggtgagccgatggtcacacggcgtgcggaagcttttgctcacattctctgtaatattccgatcatcattcgtgacaatgaactgatcgtcggaagcagcacgatcgcaccgcgaggatgtcagacattcccggaattttccttccagtggctggaagatgagctggataccgttgaaacgaggagcgcggacccgttttatattgcagaagagaccaagcaggagttaagagaagtacataaatactggaagggtaagacatccagtgaacttgctacatcctatatggatccggaagcaatcaaagcaatcgaacacaatatctttacacctggaaactatttctacaatggtgtaggtcacgtaactgttaaatatggtgaagtccttgcaatcggatacaagggaatcatcgacaaagcacaggcagagctggacaaatgccaggttggagatgccaactatgttacgaagagccatttcttaaatgcagtgatcctttcctgccaggcagcaatcgaatacgcagaaagatatgcagaactcgcatcccagatggcagcagagtgtacagatccagtacgtaaacaggaacttctgcagatttcagaaaactgcagccgtgtaccggcgaacggagctacaagcttctatgaagcctgccagtctttctggtttgtacagcagctgattcagattgaatccagtggacattccatttcacctggacgttttgatcagtatatgtatccttattataaggaagacatagacaaaggtgtgatcacaagagagtttgcacaggagctgatcgactgtatttgggttaagatgaatgacctgaacaagtgtcgtgatgaagaatcagctaagggctttgcgggatacagccttttccagaacctgatcgtaggcggacagaacaaatacggcgaagatgttaccaatgatctttcatttatgtgcatcgaggcgtccaagcaggtattcctgccgcagccgtctttgtcgatccgtgtatggaatggttctccgcatgaactgctgatgaaggcagctgaccttacaagaaccggtatcggacttccggcttactataatgatgaagttatcattccggcactgcagaacagaggcctcactctggaagatgcaagagaatacaacatcatcggatgtgttgaaccgcagaaatccggtaagacaaacggctggcatgatgcagcgttctttaatatgtgccgtccgcttgaacttgtttttgcaaatggtatggacaagggtgtacaggttggcattcagactggcgatgttaccaagatgaatactttcgacgaattctatgatgcatacaagaaacagatggaatactgtatttctctgatggtcaatgcagataatgcgatcgatgttgcacatgcagagagatgtccgcttccgttccttgcatccatggtagatgactgtctgacccgtggccttacagcagagcagggtggagcagtttataactttaccggtccgcagggatttggtattgcgaatatggcagattccctgtatgcgatccgcaagcttgtttatgaagataagaaagtttccatggagacttataaagaagcgctcgcatggaactacgacaaaggccttgatgaaaaatctgttgccgatatgtcagaaatgattctcaagggaatgcaggatgcaggaatgactgtcaacgaagatacagcaaaagcagttcttcagacagttatgagactgaaaccttccgatgagcagattcagaaatttacagaactgcatgatatgatcgatgaagttccgaaattcggaaatgccatcgatgatgtggattattttgcaagagatgttgcatatacctatacacgtcctcttcagaaatatcataatccacgtggaggacagttccatgcaggactttatccggtatctgcgaatgttccgctgggcggacagacaggcgctactccggatggccgttatgcgcatactccggtagcagatggtgtttctccttctgcaggtaaagatgtcaacggtccgacggcagcagcaacatctgtttccagactggatcactttatcgtatccaacggaacactgtttaaccagaaattccatccgtcagcacttgccggaagagaaggactggagaaatttgtggctctgatcagaacatattttgatcagaagggaatgcatatgcagtttaacgttgttgacagagcgactctgatcgatgcacagaagcatccggagaaatacgcacatctggttgttcgtgttgccggttacagtgcattgtttacaacactgtcacgttctcttcaggacgatatcatcagaagaacagaacagggcttctaa

SEQ ID NO: 70 - protein, 839 aa, Ruminococcus obeum ATCC 29174
MFNTTDVPKSSRIPKLVEALYANMPVIESARAKLLTESYKATEGEPMVTRRAEAFAHILCNIPIIIRDNELIVGSSTIAPRGCQTFPEFSFQWLEDELDTVETRSADPFYIAEETKQELREVHKYWKGKTSSELATSYMDPEAIKAIEHNIFTPGNYFYNGVGHVTVKYGEVLAIGYKGIIDKAQAELDKCQVGDANYVTKSHFLNAVILSCQAAIEYAERYAELASQMAAECTDPVRKQELLQISENCSRVPANGATSFYEACQSFWFVQQLIQIESSGHSISPGRFDQYMYPYYKEDIDKGVITREFAQELIDCIWVKMNDLNKCRDEESAKGFAGYSLFQNLIVGGQNKYGEDVTNDLSFMCIEASKQVFLPQPSLSIRVWNGSPHELLMKAADLTRTGIGLPAYYNDEVIIPALQNRGLTLEDAREYNIIGCVEPQKSGKTNGWHDAAFFNMCRPLELVFANGMDKGVQVGIQTGDVTKMNTFDEFYDAYKKQMEYCISLMVNADNAIDVAHAERCPLPFLASMVDDCLTRGLTAEQGGAVYNFTGPQGFGIANMADSLYAIRKLVYEDKKVSMETYKEALAWNYDKGLDEKSVADMSEMILKGMQDAGMTVNEDTAKAVLQTVMRLKPSDEQIQKFTELHDMIDEVPKFGNAIDDVDYFARDVAYTYTRPLQKYHNPRGGQFHAGLYPVSANVPLGGQTGATPDGRYAHTPVADGVSPSAGKDVNGPTAAATSVSRLDHFIVSNGTLFNQKFHPSALAGREGLEKFVALIRTYFDQKGMHMQFNVVDRATLIDAQKHPEKYAHLVVRVAGYSALFTTLSRSLQDDIIRRTEQGF

SEQ ID NO: 71 - DNA, 636 bp, Ruminococcus obeum ATCC 29174
atgaaagtccttggcaaagacaaggtgatcggtcgagatgttacagtagaagagatgatcaaagtagtcgaacaggatcgtccgtactaccgccgctccggagggggacttactctttcgggcggtgagagcctctgccagccggaatttgccagagatatgcttcgggcagcaaaggaacggggaatcaatactgcactggaaagtatggcctgtgctccatttgagacgatcgagacaatccttccgtatctggatctgtatctgatggatatcaagcataccaatccggcaaaacacaaagaatttaccggacgggcaaatgaccttatgatggaaaatgcccgtaaagtagcactttccggtaaatgtaagctgatcatccgtgttccggtcattccgacttttaatgatacagtggaagaaatccagggaattgcatcttttgcagatacacttccgggtgtggaacagcttcacctgcttccgtatcacagacttggtcaggataaatacatcggacttggaagaccttatttaatggaaggaattcttccaccaacacaggaacatatgcagacgttgaagaaagcagcagaatccgtaagttctctgcatgttcagattggtggatga

SEQ ID NO: 72 - protein, 211 aa, Ruminococcus obeum ATCC 29174
MKVLGKDKVIGRDVTVEEMIKVVEQDRPYYRRSGGGLTLSGGESLCQPEFARDMLRAAKERGINTALESMACAPFETIETILPYLDLYLMDIKHTNPAKHKEFTGRANDLMMENARKVALSGKCKLIIRVPVIPTFNDTVEEIQGIASFADTLPGVEQLHLLPYHRLGQDKYIGLGRPYLMEGILPPTQEHMQTLKKAAESVSSLHVQIGG

SEQ ID NO: 73 - DNA, 870 bp, Ruminococcus obeum ATCC 29174
atggtaaacgaatttgaaatcaaaaaacagatctgtgacatcggaagacgtatctacaaccgtaacatggttgcagctaacgacggaaacatttccgtaaagctgaatgacaacgaattcctttgcacaccaacaggcgtatccaaaggatttatgactccagagttcatctgtaaagtagatgctcagggtaatgtaattcaggctaacccgggattcaaaccatcttctgaaatcaaaatgcatatgagagtatatcagaagagaccggacgtaggatctgtagtacatgctcatccgatctatgcaacatcttttgctatcgctggtatcccgcttacacagccgatcatgccagaagcagttatcgctcttggatgtgttccgatcgctgagtacggtacaccttccacaatggaaattccggacaaccttgaaaaatatcttccatacttcgatgcagttcttcttgagaaccacggagctcttacatggagcacagacctgaacgctgcatacatgaagatggaatccgttgaattctatgcacagctgctgtatcagagcaaactgctcggtggcccgaaggaattcgacaaagaaaatatcaagaaactgtatgaaatccgtcgtaaattcggtatgccaggaaaacatcctgcaaacctttgccagaacaaagatggtgttaactgtcataactgcggtggcgcttgtcacagccaggattacaaacagttcccgggatatcagtatgatttcgtaggaagcgaaactaaagcagaagctccggcagctacaggagcagctgatgcagaactggttgcaaacatcacaaaacaggttatggcacagcttggaatgaaataa

SEQ ID NO: 74 - protein, 289 aa, Ruminococcus obeum ATCC 29174
MVNEFEIKKQICDIGRRIYNRNMVAANDGNISVKLNDNEFLCTPTGVSKGFMTPEFICKVDAQGNVIQANPGFKPSSEIKMHMRVYQKRPDVGSVVHAHPIYATSFAIAGIPLTQPIMPEAVIALGCVPIAEYGTPSTMEIPDNLEKYLPYFDAVLLENHGALTWSTDLNAAYMKMESVEFYAQLLYQSKLLGGPKEFDKENIKKLYEIRRKFGMPGKHPANLCQNKDGVNCHNCGGACHSQDYKQFPGYQYDFVGSETKAEAPAATGAADAELVANITKQVMAQLGMK

SEQ ID NO: 75 - DNA, 1389 bp, Ruminococcus obeum ATCC 29174
atgccaattagtgagagcatggtacaggacattgtacaggaagtaatggcaaaaatgcagattgcagatgctccgacaggaaaacatggtatcttcaaagatatgaacgatgcaattgaggctgctaagaagtctgaactgatcgttaagaagatgtccatggatcagagagaaaaaatcatcacctgcatccgtaaaaaaatcaaagaaaacgcagaagttatggctcgtatgggcgttgatgaaacaggaatgggtaacgtaggagacaagatcctgaaacatcatctggtagcagacaaaacacctggtacagaagacatcacaacaactgcatggtcaggagacagaggacttactctgatcgagatgggaccatttggtgtaatcggtgcgatcacaccttgtaccaacccgagtgaaacaatcctctgcaatacaatgggtatgctggctggcggaaatacagtagtattcaacccgcatccggcagcaatcaagacctctatctttgcaatcaatctggtaaacgaagcttctcttgaagctggcggaccggacaatattgcagtaacagtagagaaacctacgcttgaaacaagcaatatcatgatgaaacataaagatattccgctgatcgcagcaacaggcggccctggagttgttacagcagttctttcctccggtaagagaggaatcggagctggtgcaggtaacccaccggcagttgttgatgaaacagctgatatccgtaaagcagcacaggacatcgtaaacggatgtacatttgataacaaccttccatgtatcgcagagaaggaagttgtagctgtatcttctgtagtagatgaactgatgcattacatgctgacagaaaacgactgctacctggcttccaaagaagaacaggacaaattaacagaagttgttctggcaggcggtaaactgaaccgtaaatgtgtaggtcgtgatgcaagaacacttctttccatgatcggagtaaacgcaccggcaaatatccgttgcatcatcttcgaaggaccgaaggaacatccgcttatcacaacagagcttatgatgccaatccttggaatcgtaagagcaaaagattttgatgatgctgtagaacaggctgtatggcttgaacatggcaaccgtcattcagcacacatccattccaagaatgttgacaacattaccaaatatgcgaaagcaatcgatacagcaatccttgttaagaatggcccgtcctattctgcacttggatttggtggagaaggttactgtactttcacaatcgcaagccgtacaggtgagggacttacaagtgcaagcacctttacaaagagaagacgctgcgtaatgtcagacagcctttgcattcgctaa

SEQ ID NO: 76 - protein, 462 aa, Ruminococcus obeum ATCC 29174
MPISESMVQDIVQEVMAKMQIADAPTGKHGIFKDMNDAIEAAKKSELIVKKMSMDQREKIITCIRKKIKENAEVMARMGVDETGMGNVGDKILKHHLVADKTPGTEDITTTAWSGDRGLTLIEMGPFGVIGAITPCTNPSETILCNTMGMLAGGNTVVFNPHPAAIKTSIFAINLVNEASLEAGGPDNIAVTVEKPTLETSNIMMKHKDIPLIAATGGPGVVTAVLSSGKRGIGAGAGNPPAVVDETADIRKAAQDIVNGCTFDNNLPCIAEKEVVAVSSVVDELMHYMLTENDCYLASKEEQDKLTEVVLAGGKLNRKCVGRDARTLLSMIGVNAPANIRCIIFEGPKEHPLITTELMMPILGIVRAKDFDDAVEQAVWLEHGNRHSAHIHSKNVDNITKYAKAIDTAILVKNGPSYSALGFGGEGYCTFTIASRTGEGLTSASTFTKRRRCVMSDSLCIR

SEQ ID NO: 77 - DNA, 1089 bp, Ruminococcus obeum ATCC 29174
atgcttacagcactggaacattatgaaatcaaagaattcccaatgccggaagttggcgatgacgatatccttgttaaagtagaaggatgcggtatctgcggtactgacgcacacgaattcaaaagagatccatttggcctgattccggttgctcttggacatgagggaactggtgaaatcgtaaaaatgggtaaaaacgttaaagttgatacagctggaaaaccagttaaagtcggcgataaagttgttacatgtatgatcttcaaagatgatccggaaatcacaatgttcgacctcaacaagaaaaacgttggtggagctgatgtatacggacttcttccagatgatgatgtacatcttaacggatggttctctgattacatcctgatcagaggcggatccttcggatctacattcttcaacgtaagtgatctggatctggattcccgtatcctgatcgagccatgtgcagtacttatccatgcagttgaaagagcaaaaacaacaggaatcctgaaattcaactcaagagttgttgttcagggatgcggaccgatcggtcttatctgcatcgctatccttcgtacaatgggtgttgaaaacatctgtgcagtagatggaaacgcaaaacgtcttgaattcgctaagaagatgggcgctgaagtatccgtagacttcacacagtacaaaggaatcgaagctcttacagaagctgttaaagaagctcagggcggacatcttgcagactttgcattccagtgcacaggtaacccgcacgcacatgcaaacatctacaaattcatccgtaacggcggcggtctttgcgaacttggtttcttcatcaatggtggagatgctacaatcaacccgcacttcgatctctgctccaaagaaatcaacctggttggttcctgggtatacacactgagagattatgctacaacatttgatttcctcaagagagcaaaagcaatcggacttccgatgtctgatctgatcacagacagattcccgcttgagcagatcaatgaagctcataagactaaccttgcaatgacaggtcttaagatcgcgatcattaataaataa

SEQ ID NO: 78 - protein, 362 aa, Ruminococcus obeum ATCC 29174
MLTALEHYEIKEFPMPEVGDDDILVKVEGCGICGTDAHEFKRDPFGLIPVALGHEGTGEIVKMGKNVKVDTAGKPVKVGDKVVTCMIFKDDPEITMFDLNKKNVGGADVYGLLPDDDVHLNGWFSDYILIRGGSFGSTFFNVSDLDLDSRILIEPCAVLIHAVERAKTTGILKFNSRVVVQGCGPIGLICIAILRTMGVENICAVDGNAKRLEFAKKMGAEVSVDFTQYKGIEALTEAVKEAQGGHLADFAFQCTGNPHAHANIYKFIRNGGGLCELGFFINGGDATINPHFDLCSKEINLVGSWVYTLRDYATTFDFLKRAKAIGLPMSDLITDRFPLEQINEAHKTNLAMTGLKIAIINK

SEQ ID NO: 79 - DNA, 315 bp, Ruminococcus obeum ATCC 29174
atggcagaagctgtaggaattttggaagtattcgggctggcgacagcctttgtagcggcagatgcaggatgcaaggcagccaatgtccgcctggaggtgttcgataagaacaaacctgcaaacgctgacagcctgccagtaccgcttctggtatgcatcaaattccgcggaagcgtcgaagacgtaaccgcagctgtggaagcaggaatggcagaagcaaaccggagaactggtgtagtgcagcactacgtaataccgaatcctaccgaggatacggtaaagatgctgaaaatcagcgccctggataaaagctga

SEQ ID NO: 80 - protein, 104 aa, Ruminococcus obeum ATCC 29174
MAEAVGILEVFGLATAFVAADAGCKAANVRLEVFDKNKPANADSLPVPLLVCIKFRGSVEDVTAAVEAGMAEANRRTGVVQHYVIPNPTEDTVKMLKISALDKS

SEQ ID NO: 81 - DNA, 297 bp, Ruminococcus obeum ATCC 29174
atgattcaggaggaagaaacaatggcacaggaagctttaggaatggtagaaaccagaggactgacagcagcaatcgaagcagctgatgcaatgacaaaagcagcagaagtagcactggtaggaacagaaaaaatcggatccggactggtaacagttatggttcgcggtgatgtcggagcagttaaagcagctgtagaaagcggaagcgcagcagcatctagacttggagaactggttgctacacatgtaattccgagaccacacacagacgtagaaaaaattcttccaaagatctga

SEQ ID NO: 82 - protein, 98 aa, Ruminococcus obeum ATCC 29174
MIQEEETMAQEALGMVETRGLTAAIEAADAMTKAAEVALVGTEKIGSGLVTVMVRGDVGAVKAAVESGSAAASRLGELVATHVIPRPHTDVEKILPKI

SEQ ID NO: 83 - DNA, 318 bp, Ruminococcus obeum ATCC 29174
atgagtaaagcatatggttttatcgaaatcacaggtgtcgtagctgcgatcaatgcactcgatatcatgtgtaaaactgcagacgttgagctggcgtcatgggaacgtaagctgggcggacgactggtaactcttattgtagaaggcgatgtatcagcagtaaacgaagcagtcgaagctgctgtggcaggcgcaataaagaaaccggcgagttatgcagtaatcgcacggcctcacgaagaaattgtcaagctcgtggagttaagtgcaagccgttggaagaaaaaaactgacgaaacaaaaaaagaaaataaataa

SEQ ID NO: 84 - protein, 105 aa, Ruminococcus obeum ATCC 29174
MSKAYGFIEITGVVAAINALDIMCKTADVELASWERKLGGRLVTLIVEGDVSAVNEAVEAAVAGAIKKPASYAVIARPHEEIVKLVELSASRWKKKTDETKKENK

SEQ ID NO: 85 - DNA, 279 bp, Ruminococcus obeum ATCC 29174
atgacacaggaagctttaggaatggtagaaaccagaggacttacagcagcaatcgaagcagctgaccagatgtgcaaagcagctaacgtagcactcgttggaacagaaaaaatcggatccggactggtaacagttatggttcgtggagatgtaggagctgttaaatctgcagtagaaagcggaagcgcagcagcatccagacttggagaactcgttgctacacacgtaatcccgagaccacacacagacgtagaaaaaatccttccggtactgaaataa

SEQ ID NO: 86 - protein, 92 aa, Ruminococcus obeum ATCC 29174
MTQEALGMVETRGLTAAIEAADQMCKAANVALVGTEKIGSGLVTVMVRGDVGAVKSAVESGSAAASRLGELVATHVIPRPHTDVEKILPVLK

SEQ ID NO: 87 - DNA, 612 bp, Ruminococcus obeum ATCC 29174
atggtaattgatgccatcaatcagtctgaagacaaaggcaacggcttcatggttccaatcggtgtatctgcaagacacgttcatctgactcaggaacacgtagaagcattatttggaccaggatatcagctcacaaagaaaaaagatcttatgggtggacagtttgcatcaaatgaaactgttacgatcgttggtctgaagctccgtgcgatcgagaaagttcgtgtactcggaccagtccgcagtgcaacacaggttgaggtatctgcgacagatgctatcaaacttggaatgaacgttccggtacgtatgtccggagatattgcaggaagcgcaccgattgcgatcgttggaccgaagggtgctatttatctgaaagagggatgtatcgtggctatgcgtcacatccatatgtctccgaaggatgcacaggcagccggagtgaaaaacggtgatatcgtatctgtcaaagcagataatgagcgcggaacaatctttaatcatgttgcaattcgtgtagacgacagctttacactggaaatgcatattgatacagatgaagcgaatgcagcaaagattgccacaggcaatacagttaccatcataaagtaa

SEQ ID NO: 88 - protein, 203 aa, Ruminococcus obeum ATCC 29174
MVIDAINQSEDKGNGFMVPIGVSARHVHLTQEHVEALFGPGYQLTKKKDLMGGQFASNETVTIVGLKLRAIEKVRVLGPVRSATQVEVSATDAIKLGMNVPVRMSGDIAGSAPIAIVGPKGAIYLKEGCIVAMRHIHMSPKDAQAAGVKNGDIVSVKADNERGTIFNHVAIRVDDSFTLEMHIDTDEANAAKIATGNTVTIIK

SEQ ID NO: 89 - DNA, 267 bp, Ruminococcus obeum ATCC 29174
atgatagtaggtaaagtagttggaagcgtggtttccacgcggaagagcgacaagttaataggacagaaattcatgatcgtggagccggtgcatcatatgaaagctgacttatcccagatcgttgcaatcgatattatcggtgcaggtatcggggaatatgtgttggtggcacaaggaagcgcagcaagaattggctgcggcgaagaaacagcaccgatcgatgcggcaatagtcggaatcgtcgatgatggtgcaggattggagtaa

SEQ ID NO: 90 - protein, 88 aa, Ruminococcus obeum ATCC 29174
MIVGKVVGSVVSTRKSDKLIGQKFMIVEPVHHMKADLSQIVAIDIIGAGIGEYVLVAQGSAARIGCGEETAPIDAAIVGIVDDGAGLE

SEQ ID NO: 91 - DNA, 1356 bp, Ruminococcus obeum ATCC 29174
atgatggtgcaggattggagtaacgccatggaaatcaaagatttacagaaaattatgcaggacaatggtgttgtaggtgcaggtggtgccggattcccgtcatatgccaagcttacagacaaggcggacacaattcttttgaactgtgccgagtgtgaaccattgctgaaacttcacagacagctgcttgaaaaacatgcatatgagatcatgaaaactttccatacggttatggagacagttggtgcttcacaggccattatcggaatcaagaaatcatatgtacagacagttaaagcactgcagcagcacattgaagaattccctggtctgaaacttcatcttcttgatgaagtatatccgatgggtgatgaagttgtgctgatctatgaagcaaccggacgtgtatgcagaccaggcggactgccgattgagcagggcgtcatcgtattcaacgtagagacgatctacaatgtatatcaggcactggaatcccagaaacctgttacagaaaaatacgtatcagtcgtagcagaagttgaacatccggttacagttaaagtaccgcttggatgtactttagacgaagtagtagcacaggctggtaatattactaccaaagatcctgtttattttgttggcggacctatgatgggacgcattggcaacggagcagatccggtgaccaaaacaacaaacgctgttctcgttcttccaagagatcatcagatcgttatgaagaaacagagaacatcagcaatagatttaaaacgtgcagcatctatctgctgccagtgtaatacctgtacggacctttgcccaagacataatcttggacatccgatcgatccggcccgctttatgagagcagcatctgccggagatttcagagatgtaaatccatacatcgattctgcattctgcagttcctgcggtgtatgtgaaatgtatgcctgcccacagagtctggcgccaagaacacttcttgcagacatgaagggcggacttcgaaaagcaggtatcagacctcctcagggagtacagccggtaccggttcagccttcacgagaatatcgtaaggttccggaagaacgtctgatggctcgcctcggactgacaaaatacgataaggatgcaccgatggatgagaatgtagttccggtatccaaggttaagatccttttaagccagcatatcggcgcaccggcacaggcaattgtgaaaacaggcgacatggtaaccaagggacagatgatcgcacagcatgctgacggattaagcgtaagcattcatgcaagtatctctggtaaagtaactgaagtaacagaccgccacatcataattgcagcaaagtag

SEQ ID NO: 92 - protein, 451 aa, Ruminococcus obeum ATCC 29174
MMVQDWSNAMEIKDLQKIMQDNGVVGAGGAGFPSYAKLTDKADTILLNCAECEPLLKLHRQLLEKHAYEIMKTFHTVMETVGASQAIIGIKKSYVQTVKALQQHIEEFPGLKLHLLDEVYPMGDEVVLIYEATGRVCRPGGLPIEQGVIVFNVETIYNVYQALESQKPVTEKYVSVVAEVEHPVTVKVPLGCTLDEVVAQAGNITTKDPVYFVGGPMMGRIGNGADPVTKTTNAVLVLPRDHQIVMKKQRTSAIDLKRAASICCQCNTCTDLCPRHNLGHPIDPARFMRAASAGDFRDVNPYIDSAFCSSCGVCEMYACPQSLAPRTLLADMKGGLRKAGIRPPQGVQPVPVQPSREYRKVPEERLMARLGLTKYDKDAPMDENVVPVSKVKILLSQHIGAPAQAIVKTGDMVTKGQMIAQHADGLSVSIHASISGKVTEVTDRHIIIAAK

SEQ ID NO: 93 - DNA, 549 bp, Ruminococcus obeum ATCC 29174
atgagtaaagcaatcggaatgattgaatttaaaaccactgccacaggtatcacagcagcggatgccatggttaagacatctgaagtagagatcgtcgaggcacagaccgtatgtccgggaaaatatattgcaattatcacaggcgatttaagtgcagtaaaagcagcagttgacgctgcagtaactacttacgaggacaaatgcatcgacagttttgtacttggtaatcctcatgagtctctcttcccggctatgtatggaacaacacagatcgaggggatcagcgctctgggaatccttgaaacatatgatgcagcttctatcatcgaagcagctgaccaggcagcaaaaacagcaatcgtagatgttatcgaattacgtattgcaaaaggtatgtgtggaaaatcctacatgcttcttaccggagaagtttcagcagtagaagcttccatcgaaaaagcaaaacagcttgtagcatccaagggaatgtatctggattcttcagtaattgctcatccggatcagagaatgatcgattctattctttaa

SEQ ID NO: 94 - protein, 182 aa, Ruminococcus obeum ATCC 29174
MSKAIGMIEFKTTATGITAADAMVKTSEVEIVEAQTVCPGKYIAIITGDLSAVKAAVDAAVTTYEDKCIDSFVLGNPHESLFPAMYGTTQIEGISALGILETYDAASIIEAADQAAKTAIVDVIELRIAKGMCGKSYMLLTGEVSAVEASIEKAKQLVASKGMYLDSSVIAHPDQRMIDSIL

SEQ ID NO: 95 - DNA, 774 bp, Ruminococcus obeum ATCC 29174
atgctggcattagaaagacgaaatttaattcttgagaaattacaggctgagaaacgggtcgttgtaagcgaactcagtcagctttatgaggtttctgaagaaacaattcgccgtgacctcgacaagcttgaaaaagagggactggccaccaaaagttatggtggtgctgttataaatgaggatgtaagcattgacttgccctttaatattcgaaaaaaccagaatgtaagcggcaaacagcagatggctgatctagcagcctctctggtgcaggaaggtgatcatatttttcttgatgcgagtaccactgcagtatttattgcaaaggcactgaaagaaaaagaaagactcaccgtgatcaccaattccatggagatccttctggaattatctgatgtttcgggatggaatatcatttccaccggtggcgttatgaaagagggatatcttgcttttcttgggtcaaagacagaagatgcgattcgttcctattatgtggacaaagtaatcatctcctgcaaggcactggatcatgaatgggggatcatggaatcgcaggaagcttttggcacgaccaaaaaagcaatgattgcgtccggccgtgagaagattctggtagtagacagtacaaaatttgatcagaccgcattttccgttgcaggaaaactgcgggatatagatgtggttgtaacagacaggaagccatctgagaagtggctggcacattttgccgaagaaggcgtagagtgccgttatcctggtatgcagccatag

SEQ ID NO: 96 - protein, 257 aa, Ruminococcus obeum ATCC 29174
MLALERRNLILEKLQAEKRVVVSELSQLYEVSEETIRRDLDKLEKEGLATKSYGGAVINEDVSIDLPFNIRKNQNVSGKQQMADLAASLVQEGDHIFLDASTTAVFIAKALKEKERLTVITNSMEILLELSDVSGWNIISTGGVMKEGYLAFLGSKTEDAIRSYYVDKVIISCKALDHEWGIMESQEAFGTTKKAMIASGREKILVVDSTKFDQTAFSVAGKLRDIDVVVTDRKPSEKWLAHFAEEGVECRYPGMQP

SEQ ID NO: 97 - DNA, 1152 bp, Ruminococcus obeum ATCC 29174
atgaagacctttggaatgaaaacagtcattcattttggagacaacgctctagatcgcttaagagagattccatataaaagagttctcgttatcaccgatccatttgttgtgcagagcaaaatgattgatctgatcacagagcctttggcaaaaggcggcattgaatatgatattttcagcaacgtagtaccggatgcgcctgtagataagattgcagacggagttaaaaagttcttaagctatcagccggaagcagttgtcgctgttggcggcggttccgctatcgactcttctaaagcaatccgtgagtttgcactgaagatcaacaactacggtaaagtaggactgattgccgttccaactaccagtggaactggttcagaggttacatcctttgcagtcgtaaacgatacagaagcaaaagtaaaatatccacttgtttcaccagaccttacagcagatgaagcaatcctggatgcagaattagttaaaagcgtaccgccggctattacagcagatacaggtatggacgtgtttacccatgcgctggaatcttatgtaagtacaggacataatgagttttcagcagcacttgcagaaaaagcgatggagatttgcggcgtattccttctgagagcttatcttgatggaagcgatatgcatgcaagacagaaaatgcatgtagcatcctgcctggcaggtctttccttcaatacagcgggccttggaattacacacagtatggctcatcagcttggtgcacagttccatattcctcatggaagagctaatgcaatgcttttacctcatattgttgagtttaatgcaaatatcaacaagagaagcagaagccagaaaacatatcttcctgcagtagagagatacgcatctgtagcacatatcctgggactgagcaattacaaccaggtaatgagcgttcgttctcttgtaaactggattcagtttatgcagaaagaaatgaatatccctatgacaatccaggagattggaacaatcagcccggacgaatacttcggagcaattgataagatggcagatgcagcgcttgcggatgcgtgcacgccaagcaatccaagaaccccgaccaaagaggatattatgaagatttacaagaaactctggtctttctaa

SEQ ID NO: 98 - protein, 383 aa, Ruminococcus obeum ATCC 29174
MKTFGMKTVIHFGDNALDRLREIPYKRVLVITDPFVVQSKMIDLITEPLAKGGIEYDIFSNVVPDAPVDKIADGVKKFLSYQPEAVVAVGGGSAIDSSKAIREFALKINNYGKVGLIAVPTTSGTGSEVTSFAVVNDTEAKVKYPLVSPDLTADEAILDAELVKSVPPAITADTGMDVFTHALESYVSTGHNEFSAALAEKAMEICGVFLLRAYLDGSDMHARQKMHVASCLAGLSFNTAGLGITHSMAHQLGAQFHIPHGRANAMLLPHIVEFNANINKRSRSQKTYLPAVERYASVAHILGLSNYNQVMSVRSLVNWIQFMQKEMNIPMTIQEIGTISPDEYFGAIDKMADAALADACTPSNPRTPTKEDIMKIYKKLWSF

SEQ ID NO: 99 - protein, 255 aa, Alkaliphilus metalliredigens QYMF
ATGTCAACAGAAAAACAATATGTTTTGGCGGTACCAAACTTTAGTGATGGCAGGAGAAAAGAAGTGATTGAGGCGGTGGTAGAGCCCTTAAGAAATGTGGAAGGGGTTAAACTTGTCAGTTATGAACCCGAGCATGACTTTAATAGAACAGTGGTAACGGTCATCGGAGAGCCAGGACCTCTCAAGGAAGCACTATTAAACATGGCCGCAAAATCCTATGAGCTGATTAGCATGGAAGAACAGCAAGGATCTCAC

SEQ ID NO: 100 - protein, 302 aa, Alkaliphilus metalliredigens QYMF
MSTEKQYVLAVPNFSDGRRKEVIEAVVEPLRNVEGVKLVSYEPEHDFNRTVVTVIGEPGPLKEALLNMAAKSYELISMEEQQGSHPRIGAQDTIPLFPFRNISIEECAKLAEEIGSEVYKRFEVPVYFSGENARCEERKSLAFIRKGQYEGLKEVAHTDERKPDIGPAALHATAGATIVSADHEGLTAYNVFLATEDVSIAKKIAKGVRGPSGGFSTIRAVGIKFPERTGVVVSMNMFDCTATPLYRAFSFVKQEAQRYGVTVTGSELVGPVKLEHLLNSLEYHLGLEGFRKEQILETHLME

SEQ ID NO: 101 - protein, 1671 aa, Alkaliphilus metalliredigens QYMF
ATGAAAACCGATGTACAGATAGGTCAAGAAGCTAAGATGCTACCCATTACAGAGATTGCAGCAAGATTGGGTATAAAGGAAGATGAACTAGAACTTTACGGGAAATATAAGGCAAAGGTTTCTTTAGATGTATTTGACCGACTAAAGGATAAGCCTAATGGCAAACTGATTTTAGTGACAGCCATCAACCCAACTCCTGCGGGAGAAGGAAAGACAACAACAAATGTTGGTCTAAGTATGGGGTTAAATGCCATTGGTAAAACCACAATGACAACATTACGAGAGCCATCACTAGGACCTAACTTTGGCGTTAAAGGAGGAGCTGCTGGAGGTGGATATGCACAGGTTGTTCCTATGGAGGATATTAACCTTCACTTTACTGGCGATATTCATGCCATTACAACAGCCCACAACTTATTAGCTGCATTACTAGACAATCACATTCACCAAGGAAATGTATTGGATATTGATACCAGAAGAATTGCCTGGAGAAGAGTACTAGACATCAATGACCGTACTCTGAGAAACACCATTGTAGGGCTAGGAAATCGAGGAGATGGTGTTGCAAGAGAAGATGGATTCGACATCACTGTGGCTTCTGAGATTATGGCCATTCTTTGCTTAGCAACGGGAATGGATGATTTGAAAATGCGTTTGGCCAAGATGATTGTGGCCTACAATGGGGCTAATGAACCAGTGACAGCAGGTGACTTAGAGGCAACAGGCTCACTAGCACTTTTACTGAAGGATGCCATTAAGCCAAACTTAGTACAGACATTAGAAAATACACCGGCATTTATTCATGGGGGACCATTTGCAAATATTGCCCATGGATGTAACAGTGCTTTAGCCACCAAGCTAGCCCTAAAGGTAGCTGACTATGTTGTAACAGAGGCAGGATTTGGAGCTGACCTAGGGGCTGAAAAGTTCTTTGATATCAAGTGTCGCTTTGCTGATCTTAAGCCAGATTGTGCAGTCATCGTGGCAACAGTAAGAGCATTAAAAAATCACGGAGGCGTTCCAAAGGGACAATTGAATGAAGAAAACCTTCAAGCATTAGAAAAGGGCTTTGGTAACCTAGAAAAGCATATTGAAAATGTTCAAAAGTTCGGTGTACCTGTTGTGGTAGCTATGAATGAATTCCCAACGGATTCAGAAGCAGAAGTTGCTTTGTTAAGGGCGCTTTGTGAATCCAAGGGGGCTGAGGTTGTCCTATCGCAAGTTTGGGCTAAGGGCGGTCAAGGTGGCGTGGAAATGGCTAAGAAGGTTGTTGAAATTGTTGAAAGTAAACCATCAGAGTTCAAGCCACTTTACGATGTAAACGATTCTATTGTTGACAAAATTAACACCATTGCAAAGGAAGTATATGGCGCCGATGGGGTGGATTTCAGCAAGGGAGCACTAAAGCAAATCAAAGGATACGAAGAACTAGGACTAGACAAAATGCCTATTTGTATGGCTAAAACACAATATTCTTTATCAGATGATCCAACACTACTTGGAAGACCCACAGGTTTTAGAGTCACAGTGAAGGAAATTCGAGTTTCAGCAGGAGCAGGATTCTTAGTGGCACTGACTGGAGACATTATGACTATGCCAGGATTACCAAGGGTCCCAGCTGCCAACCATATGAATATTTTAGAGAGTGGAGAAATTATCGGGTTATTCTAG

SEQ ID NO: 102 - protein, 556 aa, Alkaliphilus metalliredigens QYMF
MKTDVQIGQEAKMLPITEIAARLGIKEDELELYGKYKAKVSLDVFDRLKDKPNGKLILVTAINPTPAGEGKTTTNVGLSMGLNAIGKTTMTTLREPSLGPNFGVKGGAAGGGYAQVVPMEDINLHFTGDIHAITTAHNLLAALLDNHIHQGNVLDIDTRRIAWRRVLDINDRTLRNTIVGLGNRGDGVAREDGFDITVASEIMAILCLATGMDDLKMRLAKMIVAYNGANEPVTAGDLEATGSLALLLKDAIKPNLVQTLENTPAFIHGGPFANIAHGCNSALATKLALKVADYVVTEAGFGADLGAEKFFDIKCRFADLKPDCAVIVATVRALKNHGGVPKGQLNEENLQALEKGFGNLEKHIENVQKFGVPVVVAMNEFPTDSEAEVALLRALCESKGAEVVLSQVWAKGGQGGVEMAKKVVEIVESKPSEFKPLYDVNDSIVDKINTIAKEVYGADGVDFSKGALKQIKGYEELGLDKMPICMAKTQYSLSDDPTLLGRPTGFRVTVKEIRVSAGAGFLVALTGDIMTMPGLPRVPAANHMNILESGEIIGLF

SEQ ID NO: 103 - DNA, 255 bp, Alkaliphilus metalliredigens QYMF
atgaaatatgatgtaattgtaaaaaatgcacggattcctcaaggtgacgacacaattgtaacaaacatacttgtaaaggatgaaaaaatagcaggttttttaacggatatagaaggcgtagagttcgataaaacaattgatgcagagggtcatttgaccattccaggatgcttcgattcccatacccactttatggatccaggatttacccatagagagaactttttaaccgggagttcttcagcagcagctgga

SEQ ID NO: 104 - protein, 471 aa, Alkaliphilus metalliredigens QYMF
MKYDVIVKNARIPQGDDTIVTNILVKDEKIAGFLTDIEGVEFDKTIDAEGHLTIPGCFDSHTHFMDPGFTHRENFLTGSSSAAAGGLTMIMDMPCCSKPSVRSIPELESKINNIKEKAIIDFALWGGVTGEDVREGKKHIVQDQADYGVCAFKAYMTPSVPTYERVTDPEMLEAFRWVAETGLPVGIHAENYAMCDFYVKKFQAEGRMDGPAWAEARLVEAEQAAIELGINFAESAGARLHIVHMSSGIGAKLVGAAKKRGLDVTSETCPHYLMLNYQDAMTEHGAFAKIAPPLRTTKDNKELWEGLQNGSVDFMGTDHAPYEIETEKDAEGMNIWTAFPGIPGVETLVPIMVSEGYNKGRLSLSKLVDVLSTNAAKQYGLYPKKGAMHIGSDADFTIIDLEREWTIDQKKTYSMAKYNPLHGIKLKGKPVKTVVRGTVVYDDAIGIVGKEGFGQFVKRQNIQKLDRVIKY

SEQ ID NO: 105 - DNA, 255 bp, Alkaliphilus metalliredigens QYMF
atggctaaacatgcgatacttgtcattgatatgttaaatgactttgttggggaaaaagcgccactaagatgcccaggtggagaaacaatcattccggatttacaaaaaatatttgagtgggtaagaggtcgtgaaggagatgatatacaccttgttcatattcaagaggcccatcgtaaaaatgatgctgactttagagtaagacctcttcatgcagtgaagggaacatggggatctgattttattccagagctt

SEQ ID NO: 106 - protein, 200 aa, Alkaliphilus metalliredigens QYMF
MAKHAILVIDMLNDFVGEKAPLRCPGGETIIPDLQKIFEWVRGREGDDIHLVHIQEAHRKNDADFRVRPLHAVKGTWGSDFIPELYPQEDEYIVQKRRHSGFAHTDLDLYLKEEGIDTVVLTGVWTNVCVRSTATDALANAYKVITLSDGTASKTEEMHEYGLNDLSIFTKVMTVDQYIQAWENDEDPWVGGGDAQNKVK

SEQ ID NO: 107 - DNA, 255 bp, Alkaliphilus metalliredigens QYMF
gtgagattaattgtaggcattacaggagcaagctgtaccatttatggtgtgggattgctacaggtgttaaagcagttaggtattgagacgcatctagtggtttctaagatgggacaagaagttgtctcccacgaatgtggaatggccttggaggaattaaaggagctggcgacattttatcatgataatgataatctagcggcccctattgccagtggttcctttaaaaccgatggcatgatcattgtaccctgc

SEQ ID NO: 108 - protein, 185 aa, Alkaliphilus metalliredigens QYMF
MRLIVGITGASCTIYGVGLLQVLKQLGIETHLVVSKMGQEVVSHECGMALEELKELATFYHDNDNLAAPIASGSFKTDGMIIVPCSMKTLAAVANGLSNNLLTRAADVVIKERRKLVVVPRETPLSLIHLENMTKLAKIGVTVMPAAPGFYHQPETIGDLVSIMVGRILDQMDIENNLFTRWGEE

SEQ ID NO: 109 - DNA, 255 bp, Alkaliphilus metalliredigens QYMF
atggaaaatcagatgctaagggcgaccttagcacaattagagaaaaagaaccttttggaaacctgtcatgtggaggtagatccaaaatatgagctaggagcagtattatcccattttaacaatgaaaagccaatcatatttaaaaaggtgaaggggagtcaatatcctgtagcaggagggcttttcggaaaccgtgagatatattatgatatgatggggactacggaaaaggatcggattacccagttaatggat

SEQ ID NO: 110 - protein, 451 aa, Alkaliphilus metalliredigens QYMF
MENQMLRATLAQLEKKNLLETCHVEVDPKYELGAVLSHFNNEKPIIFKKVKGSQYPVAGGLFGNREIYYDMMGTTEKDRITQLMDAVANPKPTKTLPKGPVMENIITRSIDLQKMFPIPKFHGGDSSSYITSGVVVLKDPETGKVHTSVRRLQMNERNEMSILVASPLATQQYRGFENQNKPFEVAIILGYDYPFLLASQISSATYGIDKYEVDSALRGEALELVKCHSVDLEVPAYAEIVLEGIMPPHKREQEGPFGELMGYYGNQGSHPIVEVKAVMHRNNPIMQVAFPCREEHLSNGLAREMELYAYVKNMVDVVDVNVTVSGGCRFHGIVSIKKKSQGDGKSAIIAALASSKDMKHVVIVDEDVNIYSHDEIQWAIATRFQASQDLVMIPGGLGSGLEPSHTLRGVTDKLGFDATKPLGEAAKYFERAAIPGFESIDIERYFPQLKK

SEQ ID NO: 111 - DNA, 279 bp, Alkaliphilus metalliredigens QYMF
atgagacaggccataggtatggtagaagtacgtagtttggtagcagcgatccaggcagccgacaccatggtcaaagcggcggatgtacaaattgttgacttgaactatgtagggtcaggaattatttctgttgttgtgactggagaggtagcagcggtcaaggcagccgtagacagtggtgaagaagcggcagggagacttgcggaagtgatttccactaatgtcattgcaagaccacatgaagaagtggataaattattagatcaaatcattgggtaa

SEQ ID NO: 112 - protein, 92 aa, Alkaliphilus metalliredigens QYMF
MRQAIGMVEVRSLVAAIQAADTMVKAADVQIVDLNYVGSGIISVVVTGEVAAVKAAVDSGEEAAGRLAEVISTNVIARPHEEVDKLLDQIIG

SEQ ID NO: 113 - protein, 255 aa, Alkaliphilus metalliredigens QYMF
ATGGCAAATCCTTTGGCAAAGGTGATCTTGGGAAACATAGCTAATCAAAAAAAAGTGACATCGGGTCAGAAAGTAGTAAAATCTTGGACACAGCATCTATCTTCTAATGAAGAACAATCCTTACTGTCCATTATCAATGAAAACAAGAAATTGGAAACCAAGAAGGGCGTCATGACTCAACCCCATCAACCTAGGATGGTCACCCTGGGAGAATTAAGTGGAAAAAAGCCAGGGGAAGAGATGACGGCATCAAGC

SEQ ID NO: 114 - protein, 183 aa, Alkaliphilus metalliredigens QYMF
MANPLAKVILGNIANQKKVTSGQKVVKSWTQHLSSNEEQSLLSIINENKKLETKKGVMTQPHQPRMVTLGELSGKKPGEEMTASSKGQEQKEKDDNRIQALLSQINSNKKVEPNKFETQKGVISGPHQQTMNTLAGLSGKASEKEMMKSGTVQHPGKETSNGIQTVSLGDMSKGLGMTAKKRK

SEQ ID NO: 115 - protein, 381 aa, Alkaliphilus metalliredigens QYMF
ATGCAAGCAGCTCTAGGACTAATAGAAACACTAGGATTAACTGCAGCCATTGCGGCCTTAGATGCAGCAGCCAAGGCTGCCGATGTGACATTAATTGGATACGAAAAAGTAATTGGAGCAGGACAGGGTGTCAGTGTAACGATTCAGATTGCAGGAGATGTAGCGGCGGTGAAGGCCAGTGTAGAAGCAGGGGTGATCGCTGCAGAAAGAACAGGTAGGGTGCTGGCACATCACGTGATTCCAAGACCCCATGAAGAAGTCAATGTATTAATTGAAGCCTTCAAAAAGAATGTAAAAAAGAAACAGCAGGCAGAGCCGAAAAAAGAGGCTCCTAAGAGTAAAAAAAAGCAAGATGTTTCAAGTGACTCTGTGAAGAAATAA

SEQ ID NO: 116 - protein, 126 aa, Alkaliphilus metalliredigens QYMF
MQAALGLIETLGLTAAIAALDAAAKAADVTLIGYEKVIGAGQGVSVTIQIAGDVAAVKASVEAGVIAAERTGRVLAHHVIPRPHEEVNVLIEAFKKNVKKKQQAEPKKEAPKSKKKQDVSSDSVKK

SEQ ID NO: 117 - DNA, 279 bp, Alkaliphilus metalliredigens QYMF
atgatgagtcaagcattaggtatggtagaaacaaaaggattagtaggagcggtagaggcagcagatgccatggtaaaggcagcaaatgtgacattggttggatatgaaaaaataggttttggattggtaacagtgatggtaagaggagatgtaggtgctgtaaaagctgcggttgacgcaggggcagaggcagcaagagctgttggagaacttcactctgtacacgtaatcccaagaccacatactgaggtggaacgggtattgttaaagggagaataa

SEQ ID NO: 118 - protein, 92 aa, Alkaliphilus metalliredigens QYMF
MMSQALGMVETKGLVGAVEAADAMVKAANVTLVGYEKIGFGLVTVMVRGDVGAVKAAVDAGAEAARAVGELHSVHVIPRPHTEVERVLLKGE

SEQ ID NO: 119 - DNA, 255 bp, Alkaliphilus metalliredigens QYMF
atgaatggtcatgaacaagcaagggaaattttaaagaacctgaccaatcgagccaagggagtagatcaagggcctgatgacataaaaaagcatctgctcattgttttaactggaaaagcagatggcctagaggcagcactgagggaaattccaaggctgaaacgctatggattttctgttgatttggcactttcgacctgtgcagagaaaatattaaatgaaaaaaagatagtgattccacttcaagtaggcaag

SEQ ID NO: 120 - protein, 262 aa, Alkaliphilus metalliredigens QYMF
MNGHEQAREILKNLTNRAKGVDQGPDDIKKHLLIVLTGKADGLEAALREIPRLKRYGFSVDLALSTCAEKILNEKKIVIPLQVGKIFTVREESLACKAIDVVQRVIVPAMTQNTAIKLSMGIQDEFIPRLLWQCLWKGKPLLVNLEQLLCYRGMAPQQPFLEEMMKEYIEKLQKMGVKPLSETAYGLELIEQDEDPTQKGQKVSHEKIEGKPLSFGERQVITEKDISLVPGGQKQMTLPLGTIITPLAYDKAKEKGIQLIKG

SEQ ID NO: 121 - DNA, 273 bp, Alkaliphilus metalliredigens QYMF
atgcatataggtagaatcataggaaccgtagtggcgacacctaaggatgaacgactaatgggatgtaaactcatgttaacccagccactgaacattgacaaaaacccagttggggaacctttagtcgctgtagacacaattggagctggaattggagaaatagtgctttacgccagaggaactgctgcgagatatgctgcaaatcgactccagtcccctattgatgcctccattgtaggtataattgaccatattgatatcccaggggattaa

SEQ ID NO: 122 - protein, 90 aa, Alkaliphilus metalliredigens QYMF
MHIGRIIGTVVATPKDERLMGCKLMLTQPLNIDKNPVGEPLVAVDTIGAGIGEIVLYARGTAARYAANRLQSPIDASIVGIIDHIDIPGD

SEQ ID NO: 123 - DNA, 255 bp, Alkaliphilus metalliredigens QYMF
ttgttagatgctgtaggaattaaagaagcaatcatctatcgccaattgatcgatgtgcttatggcagataatcagtttgcagatattgttttatatcaaggaaatgtaatcaatgtattaacaagagaaatgtatcaagcggatattgccatcaaagataaatatattttgatggtgggagatgctggaaagctcattggacctgatacactggtggttgatgtgagagggaaatttctatcaccgggatttatg

SEQ ID NO: 124 - protein, 604 aa, Alkaliphilus metalliredigens QYMF
MLDAVGIKEAIIYRQLIDVLMADNQFADIVLYQGNVINVLTREMYQADIAIKDKYILMVGDAGKLIGPDTLVVDVRGKFLSPGFMDSHMHFESSMLTITEFSRLSIPSGTTTLVADPHEIGNALGPIGMKAMAEEASVVPNHVHLVVPALTPDCPGLETAGYDITSKDMKEILNYPNVIGIGELQGFSNAKHVYRNTPEVITDLVASTTYAKSIGKIVDGNAPDLFGQELAAHIIATGGKCSCHETTTKEECVEKLRQGVYVFMREGSTQRNMAECIRAVTEEGLDSRRCILATDDMVAEDLEKLGHMNEIVKRTIAEGVDPIEAIQMVTINPATYFGLEDRGVLAPGKLADIAVISDLKEMTVEGVFLEGKLVASQGELLIDLPPYIYPEEVKHSVKCKKIQESAIAIPASGKEALVRCIELIPDQNLSGSLEVTVKTQQGNAISDVAQDALQMVCVERYGRNGGIGKAFVKGFGLKHGAFAESVAHDTHNIMAVGTNSKDITMAINRVIEMEGGIAVVKNGRVIEEMRLPVGGLITDELTGPEVSQKIVDLERVTKVELGCSVHAPFMHLSFLALSTSPSWKLTDQGLIDVNNFKILPPVIE

SEQ ID NO: 125 - protein, 1350 aa, Alkaliphilus metalliredigens QYMF
ATGAAAAATGAAAACGTACCAGAGGGCTTTTTAGAAAAACAATTTAAGTTAACAGAACACAAAACAAATGTAAAGACAGAGGTTCTTGCAGGGATTACCACTTTTATGACTATGGCGTATATTCTTATTGTCAACCCAATCATTCTTTCGGAAGCAGGAATGGATTTTGGAGCCGTTTTTACGGCTACAGCACTGTCAGCCATCGTGGGCACATTGGTAATGGCATTTTATGCTAATTATCCTTTTGCATTAGCTCCAGGAATGGGATTAAATGCATTCTTTGCCTACACCGTTGTACTTGGAATGGGGTATACCTGGCAGTTTGCTTTAACGGCAGTATTTTTGGAAGGGATTATTTTTATTATCTTAACATTCTTGAATGTCAGAGAAGCAGTTGTAAATGCCATCCCTAAAAACTTAAAGCATGCGGTGGCAGTGGGTATCGGTTTATTTATTGCCTTTATCGGATTTGAAAATGCTGATATTGTTGTCAGTGGTCAGTTTGTGGGATTTGACGGGGCACTTGACGGATTGATTGTTGAATTAGGGAACTTGTCTGCTGCCGCACCTCTATTAGCTATTATTGGAATTATATTGACAGGGGTGCTATTAGCGAAAAATGTAAGAGGTGCGCTTTTAATAGGAATCTTGGCAACAACGGTTTTAGGAATTCCTATGGGTGTCACACAAGTACCTGAAGGATTGCAATTCATGAGTACACCACCATCGCTTTCTCCAATTTTCTTTCAATTTGATTTTAGTAATATTTTCTCATTGGATATGGTTATTGTTCTTTTTACATTCCTATTTGTAGATATGTTTGATACTGTAGGAACATTGGTTGGAGTTGCATCTAAAGCAGATATGCTTGACGAGAATGGCAACTTACCGAGGGCTAAAGAAGCGTTGTTTGCTGATGCTGTTGGAACAACTGTTGGAGCCTGTTTAGGAACAAGTACAGTGACAACCTATGTAGAAAGTGCTGCAGGAGTAGCAGAGGGTGGTAAAACAGGACTAACGGCATTATCTGCCGCAGGAATGTTTGCAATCGCCTTACTATTTTCACCATTGTTTATCATGGTACCTGGTGCAGCCACGGCGCCAGCGTTGATTATTGTTGGACTATTCATGATGTCACCGATCAAAAAGATTGATTTAGATGACTATACTGAAGCAATTCCAGCCTTCTTGACGATCATCATGATGCCTTTATCTTATAGTATTGCAGATGGAATCGTTTTTGGTATGGTTTCATATGTAGCATTAAAGCTTCTTTCAGGTAAAGGAAACAAAGTATCACCAATTATGTATATCTTGGCACTCTTGTTTATTATAAAGTTTGCCATCTAG

SEQ ID NO: 126 - protein, 449 aa, Alkaliphilus metalliredigens QYMF
MKNENVPEGFLEKQFKLTEHKTNVKTEVLAGITTFMTMAYILIVNPIILSEAGMDFGAVFTATALSAIVGTLVMAFYANYPFALAPGMGLNAFFAYTVVLGMGYTWQFALTAVFLEGIIFIILTFLNVREAVVNAIPKNLKHAVAVGIGLFIAFIGFENADIVVSGQFVGFDGALDGLIVELGNLSAAAPLLAIIGIILTGVLLAKNVRGALLIGILATTVLGIPMGVTQVPEGLQFMSTPPSLSPIFFQFDFSNIFSLDMVIVLFTFLFVDMFDTVGTLVGVASKADMLDENGNLPRAKEALFADAVGTTVGACLGTSTVTTYVESAAGVAEGGKTGLTALSAAGMFAIALLFSPLFIMVPGAATAPALIIVGLFMMSPIKKIDLDDYTEAIPAFLTIIMMPLSYSIADGIVFGMVSYVALKLLSGKGNKVSPIMYILALLFIIKFAI

SEQ ID NO: 127 - protein, 255 aa, Alkaliphilus metalliredigens QYMF
ATGTCAAAGGTATTAATTCGCAAGGGAACCATTGTGACAATGAATGATAAACGTGAAATTTTTCAAGGAGATGTACTCATTGATGGAAATCGTATCGAAGCCATAGCATCACATATCGACGCAGAGGCCGATGAAATAATCGAAGCAGAGGGTCGGGTCGTGATTCCAGGATTTATTCAAACCCATATTCATTTAACCCAGACCCTTTATCGAGGGCAGGCCGATGATTTAGAGTTAATGGACTGGTTAAAGGAA

SEQ ID NO: 128 - protein, 445 aa, Alkaliphilus metalliredigens QYMF
MSKVLIRKGTIVTMNDKREIFQGDVLIDGNRIEAIASHIDAEADEIIEAEGRVVIPGFIQTHIHLTQTLYRGQADDLELMDWLKERVWPLEGSHGPESNYISAQLGIAELIKGGTTSIIDMGSVHHTDSIIEAVEESGFRAIVGKCMMDYGKGVPDSIMEETESSIKESVALLRKWHGRDNGRIQYAFAPRFVVSCSEELLVRVRDLAREYDVMVHTHASENRGEIELVQRDRGMRNIKYLHHLGLTGEKLILAHCIWLDDEEMRLLAQTGTRIAHCPNSNLKLASGIAKIPELIEMGAYVSLGADGAPCNNNLDQFQEMRSAALIQKARLLSPTVMPAQQVFEMATLGGAEAMGMQDELGSLEPGKKADLAIINLDGLHSNPGHGVDVISRLVYSARASDVETTIIDGKIVMKDRKLTTLNENFILNEANRIIQQQTIKAGVRK

SEQ ID NO: 129 - DNA, 255 bp, Alkaliphilus metalliredigens QYMF
atgaatgtaaagaaagtgtatcgtggaaagacagtagcggaagtattagaactactggaacagtatggttcaagaagctatgtgattgctgggggaaccgatgccattatacaattaagagaaaaacacatcgatcccgaggtaatggttgatatttcaagtgtgaaggagattcaatttatccgggagtcccaggacgaaatcgtgattggtggagggactaattttacatcaatatctgaaagtcccatgcta

SEQ ID NO: 130 - protein, 288 aa, Alkaliphilus metalliredigens QYMF
MNVKKVYRGKTVAEVLELLEQYGSRSYVIAGGTDAIIQLREKHIDPEVMVDISSVKEIQFIRESQDEIVIGGGTNFTSISESPMLQGRVKGLAQAARMVGSPQIRNTATIGGNICNASPAADIVPPLLALEAEVVIEKKGEKRRIPLDTFLMGKGKLDLKPEELVTAICFKRPKDGQGLGFGKLGLRKALAISRIATAIFISIDEKGTCKEIKIASGAVGTRGLREREVETIFTGKVLTEEVIDEGLQQLSHVVGQRLAGRSTADFKATAVKGICRQALLAALASCQA

SEQ ID NO: 131 - protein, 255 aa, Alkaliphilus metalliredigens QYMF
ATGAGAGACATTATTTTAAGTGTTAATGGAAAATCATATAAAGTAACCATTGAGGAAGAAATGCGACTCATTGATGTGTTGAGAAATAAACTTGGGTTATTGGGTGTAAAGGAAGGCTGTGGCGAAGGAGAATGTGGGGCCTGTACTATTTTGATGGATGGTGTGACCGTAAATGCTTGTATGGTGATGGCCTTCCAGGCAGAAGACAAGGCGATTTTCACCATTGAAGGTTTATCAGATGGGGTGAACCTACAT

SEQ ID NO: 132 - protein, 162 aa, Alkaliphilus metalliredigens QYMF
MRDIILSVNGKSYKVTIEEEMRLIDVLRNKLGLLGVKEGCGEGECGACTILMDGVTVNACMVMAFQAEDKAIFTIEGLSDGVNLHPIQQAFIEIGAVQCGFCTPGMVLSAKALLDQNNYPTREEIREGISGNLCRCTGYNKMVDAIELAGELLRKGGNDSEV

SEQ ID NO: 133 - protein, 255 aa, Alkaliphilus metalliredigens QYMF
ATGACAGTGAAGTATGAAATCGTAGGAAAGAGAGCAATACGGGTAGATGGCAGGAGTAAGGTTACCGGGCAAGCCACCTATCCAGAGGATTTACAAATGGAAGGTATGTGCTATGGCAGAACATTACGTTCTGAGAAGCCCCATGCCTATTTCACATTAAATACAGAAAAGGCTGAAGCCATAGAAGGTGTTTTATGCATTTTGACATCTAAGGACGTGCCTCATAACCATCATGGGGTATTGCTAAAGGATCAT

SEQ ID NO: 134 - protein, 423 aa, Alkaliphilus metalliredigens QYMF
MTVKYEIVGKRAIRVDGRSKVTGQATYPEDLQMEGMCYGRTLRSEKPHAYFTLNTEKAEAIEGVLCILTSKDVPHNHHGVLLKDHEVFCAHKVRRVGDPMAFVVAENEKVAEQAMEAIEVSYEELQGVFDPEEAMADSAPQVHDKSNVIYHYKIRRGDIQEAFKQCHVVVEGEYRTDMVDHAFLQPESGIAYTEEDGTIVICVANQYPHFDQLEVAEALEVELDTIRIINPAVGGAFGGREDITLQIHLALATQRVGRPVKATYSREESFDAHSKRHGMKMKYRTGADQQGKLLAMEATVIGDTGAYASWAINVARKAGVHATGPYEIPNVKVDSYAVYTNNPFAGAMRGFGAAQTPIAHEQQIDEIGVKLGIDPITMRVINGFKTGSETATGQILEESAPFEECLRAVEEALRSYQGPGEGQ

SEQ ID NO: 135 - protein, 255 aa, Alkaliphilus metalliredigens QYMF
ATGAAAATGCGGGGTGTAGGAATCGGAAGTGCCTTTTATGGCACAGGATATGGAAATGGCTTCCCAGATATATCAAGATGCCAGGTTGAATTACAAAAAGATGGGAAGGTTGCAGTTTATGTGGGGGCCACTGAAGTAGGCCAAGGAGCCAAGACCATCATGAGTCAGATGGCAGCTGAAGTATTGGGATTACCATTAGAAGATATTATATTTAGTTGTGAAGATACGAGGCTAACGCCTGATGCTGGTACGGCC

SEQ ID NO: 136 - protein, 325 aa, Alkaliphilus metalliredigens QYMF
MKMRGVGIGSAFYGTGYGNGFPDISRCQVELQKDGKVAVYVGATEVGQGAKTIMSQMAAEVLGLPLEDIIFSCEDTRLTPDAGTAAASRQTYNTGNAIKKACENLRQRLIDVAVAEFKFNSDVGVTMKNGLVYFKTFPSKSITLQEIASKFVEVPLREEGVFTAQTTKMDEETGQGAPYWPYTFNVYGIILEVDTETGIVDILKAVCAQDVGRAINPELIEGQMDGGFAMGLGYALMEDLNLQQGQMKHKRFSNYLIPTALDIPELEKIIIEDPESTAPFGAKGIGEPVMLGVAPAILNAIYDAVGVRITEIPVTPQRLLKALKK

SEQ ID NO: 137 - protein, 255 aa, Alkaliphilus metalliredigens QYMF
ATGAAGGATGATATTAAACGAAGAATTGATTTGGCTGCCGGCAGGAAGCGGAGCCAATTGGTACTAAAAAATGCCCAGATCCTCAATGTGTTCTCCCATGAGATCATATCAGGAGATATTGCCATTGATCAGGGTAAAATTGTTGGAATTGGAAACTATAATGGACTTGAAAATATTGACCTCGAAGGAAAAGTTGTGGTACCAGGATTAATAGATGGACATGTCCATATGGAATCAGCAATGGTGACACCGGGC

SEQ ID NO: 138 - protein, 572 aa, Alkaliphilus metalliredigens QYMF
MKDDIKRRIDLAAGRKRSQLVLKNAQILNVFSHEIISGDIAIDQGKIVGIGNYNGLENIDLEGKVVVPGLIDGHVHMESAMVTPGQFARAIVPRGTTTIVADPHEIANVCGIPGIEYMLKASEGMPLNVYMMLPSCVPATSFENAGANLKAKDLAPLINHEKVLGLGELMDYPGVIAGEESIIDKIMIAEGKMIDGHGPDIKEEALNAYVAAGVRTEHECSTVEEMINRLRLGMYILIREGSAARNLKTLVRGITPENMRRCLFCTDDKHPEDILEAGHIDHNVRVAIKEGLDPISAVKMATINAAECYGLKDLGAIAPGYRADLVVLDNLETFHVTKVFKDGKLVAQDGKAFFEAQSTEDHTVTQTVNAKELTPEDLVLSLETDIVNVIKLLPHSLVTQRVSRKVEVKEGTFRYHEDLDILKLAVIERHKRTGNIGLGLVEDFRLKGGAIASTVAHDSHNIIVIGDNDEDMLLAVNELNTVGGGITICSKGEILQTLSLPIAGLMAQGTMEEVNEQLKQMLEIAYKKLGINEQIDPFMTLSFLALPVIPELKLTDLGLFDVKNFRFISLNR

SEQ ID NO: 139 - DNA, 255 bp, Alkaliphilus metalliredigens QYMF
atgaagttaattgaagtccttgacatggaaggcatagcccatgggatgattacgatcattggatccggaggaaaaaccagtaccctttatcgattagcagtagagctaggggatcaggggaataatctattgttgacaacaacaacagcaatgaaactaccaaaaaattctcagaagatgaaagtgttaattgaatcagatattgaagtgcttcatgattatctcatgaagttcaaggatgcgaggcagattttt

SEQ ID NO: 140 - protein, 259 aa, Alkaliphilus metalliredigens QYMF
MKLIEVLDMEGIAHGMITIIGSGGKTSTLYRLAVELGDQGNNLLLTTTTAMKLPKNSQKMKVLIESDIEVLHDYLMKFKDARQIFAGKELIGDDKVKGYDPEDLVWLHQRLEGRQILVEGDGSKGKSLKIPASWEPQVPQSTMLTIVVIGWDIIGKSLEEKWIHRCHLLKDKNLLGDENITNRKVDEAMLLKLLESPLGLLKGIPPNSSVALLLNKVYTEDEKKLATKMASIVLSQIPRIGKVLLGEVQVKGQLTVGKE

SEQ ID NO: 141 - DNA, 255 bp, Alkaliphilus metalliredigens QYMF
gtggttgcaatcattttagcttctggatttagtcaaagaatgggaacaaataagctattacttccctatcaagaaaaacctattttacagtgggtcattgagggaatagaacaacttcatatggaaaagattatattagtatatcgagaagaagccgttaaaagcctagtgaaaaatagaaatatacaattgatttataatgaagaagccattcagggccagagtcaagctgtgatcaaggggcttcaggcagtg

SEQ ID NO: 142 - protein, 192 aa, Alkaliphilus metalliredigens QYMF
MVAIILASGFSQRMGTNKLLLPYQEKPILQWVIEGIEQLHMEKIILVYREEAVKSLVKNRNIQLIYNEEAIQGQSQAVIKGLQAVDESVEDYMFFMGDQPLLVLEELKEMIRAYGESPASIAVPYYEEKPGAPVIFSKRWRRSLLQLRGDSGGRRIIRDNQDEVLFYPIKQALMGWDIDTQRDYEELLKEDM

SEQ ID NO: 143 - DNA, 255 bp, Alkaliphilus metalliredigens QYMF
atgaatgtcttagaacaggctttattgttaatggggaaacgaaaacgatttgctatggccactgtcattgaaaccagtggatcggtaccgggtagagtaggggctaagctcatttatactgaagaagaaaaacccttaggaagcgttggtggtggaaaaatcgaatctgaggttcttaagatgattcctgagttattggaaaataacgaaagtcgtgtattaacctatcatttaactaaaggctcccaagggatt

SEQ ID NO: 144 - protein, 255 aa, Alkaliphilus metalliredigens QYMF
MNVLEQALLLMGKRKRFAMATVIETSGSVPGRVGAKLIYTEEEKPLGSVGGGKIESEVLKMIPELLENNESRVLTYHLTKGSQGIGMNCGGTAKVFVEIVQPRPKLVVCGGGHIGYEVVQCAQHLDMEITIIEERKEFATEERFPHAAQRIMKPTYGEGLSDVEIDEQTYVVVVTKGSTTDEEVLETILGKPAAYIGLMGSQRKKIEIMKSLEEKGYQKNLLDQIYCPIGLDLQGGNPAEIALSIMAEVVSVKNK

SEQ ID NO: 145 - DNA, 255 bp, Alkaliphilus metalliredigens QYMF
atgttaggtaaactcgttgtacttcgaggagggggcgatatagcaactggaattgcccataggcttagaaattgtggttttaatgtggtgatactagagatgaatgagcccacagtgatccgtagacgggttgcctttgcacaagctgtctttgaaggtgaagtgatagtagaagacgtaaaggccaaacgtattgaaaatactacagaagtacacactgtattaggagctaaatgtattcctgtgatggttgat

SEQ ID NO: 146 - protein, 255 aa, Alkaliphilus metalliredigens QYMF
MLGKLVVLRGGGDIATGIAHRLRNCGFNVVILEMNEPTVIRRRVAFAQAVFEGEVIVEDVKAKRIENTTEVHTVLGAKCIPVMVDPEGKTIGDLKPDVVVDATLAKVNKGTIKEMAPLVIGVGPGFTAGLDVHVVVESQRGHDLGKVIWNGRAHRNTGIPGEIMGISEERIVRATGDGKIRNLKPIGTRVEKGEIIAHIGELPVEGRIDGVLRGMIENGSTVKDGMKIGDIDPRGIRSYCFTISDKARSIAGGVL

SEQ ID NO: 147 - DNA, 468 bp, Carboxydothermus hydrogenoformans Z-2901
atgaaaaagctttcccttactgttaacggaaaattaattgaaagggaagtaccaaccaacatccgccttctcgatttccttagagattacctacacctgaccggtaccaaggaaggttgcggtgaaggagagtgcggtgcttgcaccgtattactggatggaaaaccggtcaactcttgcttggtaatggcccattcggctcacgggcgggaagtgattaccattgagggcataggtacaccggataaacttcatcccattcaagaggcttttttggaggcaggagcggtgcagtgcggttattgtactcccggaatggtactggctgcctatgctttattaaaagaaaatcccaatccaacccgggaggaaataaaagtggcaatttccgggaacctctgccgttgtaccggttacaacaaaattgttgatgcggtggaacttgctgcccgaaaggagggaaagtaa

SEQ ID NO: 148 - protein, 155 aa, Carboxydothermus hydrogenoformans Z-2901
MKKLSLTVNGKLIEREVPTNIRLLDFLRDYLHLTGTKEGCGEGECGACTVLLDGKPVNSCLVMAHSAHGREVITIEGIGTPDKLHPIQEAFLEAGAVQCGYCTPGMVLAAYALLKENPNPTREEIKVAISGNLCRCTGYNKIVDAVELAARKEGK

SEQ ID NO: 149 - DNA, 861 bp, Carboxydothermus hydrogenoformans Z-2901
atgcaaaaggttgattattttcgacccgaaaccatagaggaagccctggagcttttagccgctggtcgggaagagtataaaattctcgctggcggtaccgacctggtgcttcatttacgggagaggaaagttagtcctaaggctttggtggatatcactcatatttctgctcttcggggcattagagaagaacaaggaaaaattattattaaagcggcaacaacctttacggaagttgccacctcctcaattgttttagaaaaaatcccggcccttgccgatgcctgtaaagttgtgggctcaccgcaaattcgcaatcaagggaccattgggggcaatatagtaaacgcctctccagccgccgattcggtaccggcgttggtgctgtttgatggggtagccaaacttaaaagtaaaaggggtacccgggagattttacttaccgagcttctcaagggagccggaaaaacagcaattgaaccggatgagttgttagaagaggttattttaacgccgtatccaggaagtgtcagcggtttttacaaactcgggcgacggaatgccctggcgatatcgcggatttctggagcggtggagcttgtttttgccggcagcaaaattgaaaaggcaagagtggccctgggttcggttgctcccaatccctttcgggcagcagaattagaacagtttttaagcggtcgggaatttaacgaagaaactaaagaagagcttatcgttcttgccaaaaagttggtggcggataagcttggcagtcgtgcatcggcgccctacaaacgcgaagcgattgccggagttatgcgggaaattttaaatctcattgaacagcgccgggggaggtag

SEQ ID NO: 150 - protein, 286 aa, Carboxydothermus hydrogenoformans Z-2901
MQKVDYFRPETIEEALELLAAGREEYKILAGGTDLVLHLRERKVSPKALVDITHISALRGIREEQGKIIIKAATTFTEVATSSIVLEKIPALADACKVVGSPQIRNQGTIGGNIVNASPAADSVPALVLFDGVAKLKSKRGTREILLTELLKGAGKTAIEPDELLEEVILTPYPGSVSGFYKLGRRNALAISRISGAVELVFAGSKIEKARVALGSVAPNPFRAAELEQFLSGREFNEETKEELIVLAKKLVADKLGSRASAPYKREAIAGVMREILNLIEQRRGR

SEQ ID NO: 151 - DNA, 1812 bp, Carboxydothermus hydrogenoformans Z-2901
atggatgcccaaacctttaagaccgcaattgtccggcgtcgcttagttgatgttttaatgaatccggaattaaaagcgacgttggtcttaaaaaacggtctggtaatcaatgttgtaactcgggagatctatccggcagacgtggcagtttacgatgaatacattttaaaagtgggagatgcttccgacctaattggcccggaaacggaagtggtggatttacagggaaaatattacgtatctccaggatttatcgactcccacatgcattttgaaagcagtatgctaaccatttccgagtttagccggttgtctattccttcgggaaccactactttagtggcggacccccacgaaattggcaacgcgctgggacctgttggtattaaagctatggccgaagaaacaaaggtagttcccaacagggtatatttggtagtgccggctttaactcccgactgtccgggattagaaaccgcgggctatgatattacttccagggatatgccggaaatactaaattaccccaatgtcatcggcatcggggaacttcagggcttttccaatgctaagtatgtttataaatacaccccggaaattattaccgacttaattgcctcaacaacctatgccaagtccattggcaaaatagtggatggtaacgctccggagctttttggcagcgaattagctgctcatttaattgctgccggaaccgaggcttcctgtcacgagaccaccaccaaagaagaatgtgtggaaaaacttcgctacggtatgtatgttttcatgcgggaaggttctacccagaaaaacatggccgaatgtatccgggcggttaccgaggaaggtctggattcccggcggttaattggggctaccgatgatatggtggccgaggatttagccaaaaatggccacatgaactgggtagtagcccggatcattaaacaagggattgatccggtggaagcaatccaaatggtaaccattaacccggctacctactttggcttaaaacacgttggggttttagctccggggaagatggccgatatcgtggttatttccgacttaatggacatgaaagtggaaaaagtttatatcggcggaaaattagtggccgaaaagggcaaaatggtagttaacatcccgaaatacacctaccccgaagaggtaaaacattcggttaagtgtaaaccggtaacagctgaagccctggaaatcaaagctactggtagtaatgcggtagtgcgcaccattgggttgattcccgaccagaaccttaccgagtcctttgaatttaccgttccggttagtgggggtgtggcacaaccggatttaacccaggacgtactaccgattgcggtggtggaaagatacggacgaaatggcagtattggacgggcttttgttagaggttttgggttaaagggcggtgcgtttgcggaaagtgtcagccacgatgctcacaacatcattgtggttggaaccagttaccaggatatggcgttagcggttaaccgggttattgaaatgggcggtggcgtggcggtggtgaaaaacggcagggttttaggcgaccttcgcctgccggtaggaggtttaattaccgacgagttagatggctatgaattatctcggaagattgccgaactccatcgtttaactgccgtggagcttggttgtaccgttcatgcaccgtttatgcatctgtcgtttttagctttgaccaccagtcccaagtggaaaattaccgaccagggtttaattgatgttaatagttttgccatcattccgccggttaagtaa

SEQ ID NO: 152 - protein, 603 aa, Carboxydothermus hydrogenoformans Z-2901
MDAQTFKTAIVRRRLVDVLMNPELKATLVLKNGLVINVVTREIYPADVAVYDEYILKVGDASDLIGPETEVVDLQGKYYVSPGFIDSHMHFESSMLTISEFSRLSIPSGTTTLVADPHEIGNALGPVGIKAMAEETKVVPNRVYLVVPALTPDCPGLETAGYDITSRDMPEILNYPNVIGIGELQGFSNAKYVYKYTPEIITDLIASTTYAKSIGKIVDGNAPELFGSELAAHLIAAGTEASCHETTTKEECVEKLRYGMYVFMREGSTQKNMAECIRAVTEEGLDSRRLIGATDDMVAEDLAKNGHMNWVVARIIKQGIDPVEAIQMVTINPATYFGLKHVGVLAPGKMADIVVISDLMDMKVEKVYIGGKLVAEKGKMVVNIPKYTYPEEVKHSVKCKPVTAEALEIKATGSNAVVRTIGLIPDQNLTESFEFTVPVSGGVAQPDLTQDVLPIAVVERYGRNGSIGRAFVRGFGLKGGAFAESVSHDAHNIIVVGTSYQDMALAVNRVIEMGGGVAVVKNGRVLGDLRLPVGGLITDELDGYELSRKIAELHRLTAVELGCTVHAPFMHLSFLALTTSPKWKITDQGLIDVNSFAIIPPVK

SEQ ID NO: 153 - DNA, 273 bp, Carboxydothermus hydrogenoformans Z-2901
atgttactgggaaaagttattggtaacgtagttgccacgcggaaagatgaaacattggtcgggacaaaaatgctcattaccctgccggtagacttagatggtaatcccgcaggtcagccgtttgttgctgtggatacggtgggagctggagttggcgagttggtgctgtatgttaccggaagtgtggctccctttgcggtacgccggggggaggtacctatcgatgcggcgattatcggtattgtggataagcttgaatggcaacgaagttaa

SEQ ID NO: 154 - protein, 90 aa, Carboxydothermus hydrogenoformans Z-2901
MLLGKVIGNVVATRKDETLVGTKMLITLPVDLDGNPAGQPFVAVDTVGAGVGELVLYVTGSVAPFAVRRGEVPIDAAIIGIVDKLEWQRS

SEQ ID NO: 155 - DNA, 762 bp, Carboxydothermus hydrogenoformans Z-2901
atgtccatttatcttactgcaatgaaaaactatttggagcagcaaaatagcttaaacagttcaaagccaaaagcactaattttggttgctggagcgaccggtggggcgcaagaaggctttcaagctttagaacgtttaagggaaagctatgaaataatagttgtagccagtcaagcggctttggatctttacggtgaagaaaatcttaaatcccttaccggaacagcaaaaatctaccagggtaaggagtttaaaatttatgactttttaaaagttgtgaccatagtgtttttaccggtggtgtcttccaacctggtgggcaagttagcccatggcatttatgatgaaccgttagcttccttaatttttcatgccaagcttgcgggcaaaccggttataggtgttgtggatggagctttacccgatggtgatggctttaaaagccggggatttaccaatccccctccgggtctggtaaagcttattaatgaaaatatcgaaaaactacgggcccaggagatctatctctataaaggtaaaacgattttagaaaagctttctccctaccttggaccgcaaacagcagaaacttctgttgtttcatcaaagacgggagttactttaaataaacgggttattacccgagaagatcttttagaacttgccaatcaaactattactgtgtcacaaaaaacaattattaccgaccttgcccgggaatatgctgtccaaaataatataaaaattaattttgctgaatag

SEQ ID NO: 156 - protein, 253 aa, Carboxydothermus hydrogenoformans Z-2901
MSIYLTAMKNYLEQQNSLNSSKPKALILVAGATGGAQEGFQALERLRESYEIIVVASQAALDLYGEENLKSLTGTAKIYQGKEFKIYDFLKVVTIVFLPVVSSNLVGKLAHGIYDEPLASLIFHAKLAGKPVIGVVDGALPDGDGFKSRGFTNPPPGLVKLINENIEKLRAQEIYLYKGKTILEKLSPYLGPQTAETSVVSSKTGVTLNKRVITREDLLELANQTITVSQKTIITDLAREYAVQNNIKINFAE

SEQ ID NO: 157 - DNA, 810 bp, Carboxydothermus hydrogenoformans Z-2901
gtggagctcgaacaaaaacttaacttgttaaatgatttaattgtcagagaaatagtaaatccgctgccaccaccctataaagttggcgttgacctcggaactgcagatatcgttttggtggtcaccgaccaggaaggaatacctgttgctggagcattaaagtgggccagtgtggttaaagatggcttggtggtcgattacatcggagcaattcagattgtgcgggaactaaaagccaaagtggaaaggcttttagggagtgaactttttcaagcagccacggccattcctccgggaactgtaggtcggaatgctgaagcttgtggtcatgtagttgccggggccggattggagctggtaacactggtggatgagccggtagctgccgcacgggcccttgggataaatgatggtattgtagtagacataggtggcggtaccaccggtattgcggtaattgaaaaagggaaaattaccgcaacctttgatgaaccaacaggaggaactcatctttccctggtcttagcaggaagttacaagattccttttgaggaagcagaaaccatcaaaaaagattttagccgtcatcgggaaattatgccggtagtccgtccagttattgaaaaaatggcgcttatagttaaagaggtaattaaaaattacgatcaaactttaccggtttatgtggtgggtggtactgcttacctaactggttttagcgaagagttttccagatttcttggaaaagaggtacaggtacctatccatccgctgttggtaacccctttagggattgcgctttttggatag

SEQ ID NO: 158 - protein, 269 aa, Carboxydothermus hydrogenoformans Z-2901
MELEQKLNLLNDLIVREIVNPLPPPYKVGVDLGTADIVLVVTDQEGIPVAGALKWASVVKDGLVVDYIGAIQIVRELKAKVERLLGSELFQAATAIPPGTVGRNAEACGHVVAGAGLELVTLVDEPVAAARALGINDGIVVDIGGGTTGIAVIEKGKITATFDEPTGGTHLSLVLAGSYKIPFEEAETIKKDFSRHREIMPVVRPVIEKMALIVKEVIKNYDQTLPVYVVGGTAYLTGFSEEFSRFLGKEVQVPIHPLLVTPLGIALFG

SEQ ID NO: 159 - DNA, 285 bp, Carboxydothermus hydrogenoformans Z-2901
atgggtgaagctttaggtttaattgaaactaaaggtttagtggcggcgattgaagcggcggacgcgatggtcaaggctgccaatgttactattgttggctatgaaaaaattggctttggtcttgtcaccattatggtgcggggcgatgtaggtgcggtcaaagctgctaccgatgccggggctgctgctgcccagaaggttggcgagctggtagcggtacacgtcattccgcggccacacactgaagttgaaacgcaaattttagccaaaattcaagggaaatag

SEQ ID NO: 160 - protein, 94 aa, Carboxydothermus hydrogenoformans Z-2901
MGEALGLIETKGLVAAIEAADAMVKAANVTIVGYEKIGFGLVTIMVRGDVGAVKAATDAGAAAAQKVGELVAVHVIPRPHTEVETQILAKIQGK

SEQ ID NO: 161 - DNA, 354 bp, Carboxydothermus hydrogenoformans Z-2901
atgaataaagcccttggtctaattgaagcaattggttactctaccgctatgacggctttagatgctgctgtaaaagctgccaacgttacctttttgggctttgaacgggttataggggctggaaaaaaaatttccgttaccataaagcttgaaggggaggttgcggcggtaaaagctgcggttgatgcaggtgttgcggcggctcaaagagtgggcgaagttttaacttcgcatgtaattcctcgaccccatcaggagttagataaaatcatttttagcagtgaaacccaagaatcgttgttaaagcctaaaaatcctgcggaaaaaaataaggataataaaaaatctaagtaa

SEQ ID NO: 162 - protein, 117 aa, Carboxydothermus hydrogenoformans Z-2901
MNKALGLIEAIGYSTAMTALDAAVKAANVTFLGFERVIGAGKKISVTIKLEGEVAAVKAAVDAGVAAAQRVGEVLTSHVIPRPHQELDKIIFSSETQESLLKPKNPAEKNKDNKKSK

SEQ ID NO: 163 - DNA, 951 bp, Carboxydothermus hydrogenoformans Z-2901
gtgtctgaggttttaaatcggcagagccgagaaattactacgattgttagccaacctaatataagccgtcccaattatcagcgggaaaaaggaaaggaacggcttttaggaattaaagcaacggaaagtagcaataaagcaggtcaatcctttgttcctcagttaaatcccagcggaaccctttttaccatttccatgaaaccaccggcgaaaattaatactggatacacgcccgtggacgagcaaaaagaagttaaagctgaagttaggaattcggaaattacggagaaaagttttgggcaagcaaaatttatcggggtttcggcgggaaacaccgttggttacgtaattcccaatcttgaaccggggcttagccaatacctccaggctaacagaagcttaagagctattggggtaattagctcccgggttggggctgcggcgcaaatcatggcagccgatgaagcggtcaagaagaccaattccgaattaattcggttagagcttgcccgtgatgaattaggtggtccgggacatggagtatttgccctttttggggcagaagatgtggcagatgttatccgggcagtggaaattgccctcaaggccacggaagagtactaccagaacataaaaaatacgccggcaggaaaaattgaaacccattacacggctcgcgcagcggcagcattaaacaaggcttttggggcgccgttaaatcaggcctttggcattattataggggctccggcaggggtaggattattgatgagtgataccgccttaaaaactgcccatgtgaccatggtatcgttctgggggccctcggtagttcaggcttttgccaacgaggtatggtttacagtaaccggcgattcagcagcggttaaaaatgccttagaagcagctcgggaagttggattgcaggttttggcggaatttagggcttaa

SEQ ID NO: 164 - protein, 316 aa, Carboxydothermus hydrogenoformans Z-2901
MSEVLNRQSREITTIVSQPNISRPNYQREKGKERLLGIKATESSNKAGQSFVPQLNPSGTLFTISMKPPAKINTGYTPVDEQKEVKAEVRNSEITEKSFGQAKFIGVSAGNTVGYVIPNLEPGLSQYLQANRSLRAIGVISSRVGAAAQIMAADEAVKKTNSELIRLELARDELGGPGHGVFALFGAEDVADVIRAVEIALKATEEYYQNIKNTPAGKIETHYTARAAAALNKAFGAPLNQAFGIIIGAPAGVGLLMSDTALKTAHVTMVSFWGPSVVQAFANEVWFTVTGDSAAVKNALEAAREVGLQVLAEFRA

SEQ ID NO: 165 - DNA, 273 bp, Carboxydothermus hydrogenoformans Z-2901
atgggtaatgcaattggctttgttgaaacccgggggcttacagcagcaattgaagcagcggatgcgatggtgaaagcggccaatgttcgaattattgaataccgggtggttggctcaggcctggtgaatattacagtgcaaggagatgtagcggcggtaaaagcggcggtggatgccggtgtggcagcggcgcaaaaagtgggagaaatagtatcctttaacgttatccccagaccccatgaagaaatgctgaaggttatacccgtgatataa

SEQ ID NO: 166 - protein, 90 aa, Carboxydothermus hydrogenoformans Z-2901
MGNAIGFVETRGLTAAIEAADAMVKAANVRIIEYRVVGSGLVNITVQGDVAAVKAAVDAGVAAAQKVGEIVSFNVIPRPHEEMLKVIPVI

SEQ ID NO: 167 - DNA, 1353 bp, Carboxydothermus hydrogenoformans Z-2901
ttggcagcatcgctgaggagttttttagagcaattaaaacggcaaaactcattatatttagtgaaaaaaccggtaaaccccagatttgaactgggagcactcctgaaaaaaaccaagggaactgttcccatgttttttcaaaacattgaaggctacgatgtaccggcggtaggtggcattgttggtaccagggaaaattttgctcaagctttaaggataaacaaatccgagttgttagccaaaataaccgaagcaatcactaatcctggtgaaacccggttactgccgtccggtccggtacaggaaaatgtcttgaccaaaggttttgatatcggaaaaatgtttccaattcctacttttcacgaaaaagattccggagcgtttataacagcgggtatcgttgtagccaaagatcccatttacggacggcgttttacctctattcgccggatgcagttaaacggacccaacaacttgagcattttaattgaatcgccggggttaattgaacaatactatgaatttgaaagacgtggccaggccatggaagtggccatagttttgggtgttcacccggccataactttatccagccaacttccgacccaaacctttggtttagataagtacaatgtggccagccggctcataggcgagccgcttccggtggtaaaatgcaaaacaattgatttagaagttccggccgatgcggaaatagtgctggaaggacggatgttaccgtatgttcgtcatcccgaaggaccctttggcgaattaatgggctactacggaccgcaaacaatgcagccggtggtggaggtcaccgcggtaaccttcagaaacaacccgattttccaagttatcttcccttctagctacgaacataaattaccaaatgctttgatgcgggaagtagtcttatttaaccacgttcgccatgtggttccaacggttcaagatgttcacctaaccatggccggcggtggacgctgccatgcgattatttccattaaaaagacggccgaagggcaaggaaagcaggcaatttttgcagctctggccagcaataaggatgttaaacacgtagtggtggttaatgacgatgtagatatctttgatccggaagatgtagaatgggccattgccaccagggtgcaagcggatcaggatataataattatccccggggcgcaggggacgccactggagccatcccacaatttaagaggggtatcggccaaaatgggaattgatgcgacctatcccctggcggaagaagaacgatttgcccggactcagattccgggatatgaccaaatccggttggaagattacttaaccctggactggtag

SEQ ID NO: 168 - protein, 450 aa, Carboxydothermus hydrogenoformans Z-2901
MAASLRSFLEQLKRQNSLYLVKKPVNPRFELGALLKKTKGTVPMFFQNIEGYDVPAVGGIVGTRENFAQALRINKSELLAKITEAITNPGETRLLPSGPVQENVLTKGFDIGKMFPIPTFHEKDSGAFITAGIVVAKDPIYGRRFTSIRRMQLNGPNNLSILIESPGLIEQYYEFERRGQAMEVAIVLGVHPAITLSSQLPTQTFGLDKYNVASRLIGEPLPVVKCKTIDLEVPADAEIVLEGRMLPYVRHPEGPFGELMGYYGPQTMQPVVEVTAVTFRNNPIFQVIFPSSYEHKLPNALMREVVLFNHVRHVVPTVQDVHLTMAGGGRCHAIISIKKTAEGQGKQAIFAALASNKDVKHVVVVNDDVDIFDPEDVEWAIATRVQADQDIIIIPGAQGTPLEPSHNLRGVSAKMGIDATYPLAEEERFARTQIPGYDQIRLEDYLTLDW

SEQ ID NO: 169 - DNA, 552 bp, Carboxydothermus hydrogenoformans Z-2901
atgcgcattgtagtaggggtaaccggggcaagtggggccatttacggctatacgctaatccaggtactggcccagatggggattgaagttcatgcggtttataccgaaatgggtgagaaagttttaaatcacgaatgcggtgttgatttggcggaagtcgctaaatatgcccggctgtaccataattccgacctgtttgccccgattgccagcgggtcgtttaaaacccaggggatggtggtggttccctgctccatgcataccctgggagcgatggccaacggtacgggagaggatttattaaccagggccgcggatgttactttaaaggaaggtcggaggttagtagttgtaccgcgggaaactccggtgaccgttatacatctggaaaatatgctccgcttgtccagggtgggggcagtaattttacctgcttctccggcgttttactttggtccccagaccttaagcgatttggtggctttcataatagggaaaattttagatgcccttgcaattgaacacaatttgtttaaacgctggggggagtag

SEQ ID NO: 170 - protein, 183 aa, Carboxydothermus hydrogenoformans Z-2901
MRIVVGVTGASGAIYGYTLIQVLAQMGIEVHAVYTEMGEKVLNHECGVDLAEVAKYARLYHNSDLFAPIASGSFKTQGMVVVPCSMHTLGAMANGTGEDLLTRAADVTLKEGRRLVVVPRETPVTVIHLENMLRLSRVGAVILPASPAFYFGPQTLSDLVAFIIGKILDALAIEHNLFKRWGE

SEQ ID NO: 171 - DNA, 576 bp, Carboxydothermus hydrogenoformans Z-2901
atgaaaggtgacagacactgtatagttatcattgacatgttaaacgacttcattggacccaatgctcctttaagatgccccgatggggaaaaaatcgttcccaacttgcaaaagcttgtagaatttgcccacgaaaacggtattaacgttgtttttgtgcaggaagcacaccggaaaaacgatgctgactttagagtacgtccggttcatgctgttaaaggtacgtggggttctgactttattccggaacttcgtcccgatgaagaaaaaggtgattacattgtgcaaaagcgccgtcacagtgcttttgcttacactgacttagacctctacctcagagaagaaaaaatcgacaccgtagtagttaccggtgtatggaccaacgtttgcgtaagaagcaccgcttccgatgctctttatcatgcttacaacgtaattgccatatccgactgttgcgcttctgctaacgaagaaatgcatcaagcaggcttgagagacatggcgttgtttgccgaagttatgactttagaagaatacatgaaagaatggcccaatcgggaaggtgccaagaagtaa

SEQ ID NO: 172 - protein, 191 aa, Carboxydothermus hydrogenoformans Z-2901
MKGDRHCIVIIDMLNDFIGPNAPLRCPDGEKIVPNLQKLVEFAHENGINVVFVQEAHRKNDADFRVRPVHAVKGTWGSDFIPELRPDEEKGDYIVQKRRHSAFAYTDLDLYLREEKIDTVVVTGVWTNVCVRSTASDALYHAYNVIAISDCCASANEEMHQAGLRDMALFAEVMTLEEYMKEWPNREGAKK

SEQ ID NO: 173 - DNA, 1416 bp, Carboxydothermus hydrogenoformans Z-2901
atgggttttgatttggttttaaaaaatgccaaaatccctcaaggcaaccggactgtggacacccacatcctggtgaaggacggtaaaattgccggttttaccaatgaccttaccgggattgaggttgccgaagtaattgatgctgaaaataaccttgtattgcctgggtgcattgactcccacactcactttaatgatcccggctttacccaccgggagaattttgctaccggtactcaagctgctgcggctggtggggttacaaccatcattgatatgccctgctgtagcataccgtcggtaaggagtgtggataaccttgaagcaaagttagaagtaatcaaggacaaagcgtatgtagactatgccatgtggggtggggctaccggcgaagatgtgcggaacaatgccctctacaacattaaagaacaagccgattatggagtagtagcttttaaagtttacatgactccatcagttccaacttatccgccggcaagcgatgcggagatgctggaaattttccgggaagtagctaagaccggactacccgttggcattcacgcggaaaacttggacctttgcacttatcacgttaacaaattaagaaatgaaggccgttttgatgggccggcctgggcggaagcacggttggaacttgcggaaaaagttgctattcaaatggccattagttttgcggaagaaaccggtgcccggttacatatcgtccacatgagcaccggcatcggtggtgtgcttgtaggagaagctaagaaacggggtcttgatgtaaccgccgaaacttgtccccactacctggtcttaaatgcctatgaatcaatgaccaaatggcgtcaatttgccaagattgcaccgcctttaagaactaccagagacaatgaaatgctctgggaacaattagctgatgggcgggtagactttattgctactgaccatgcaccttatgaaattgctaccgaaaaagaagctgaaggcatggacatctggacggcgttcccggggattccgggggtagaaaccatggtaccgattattatcagcgaaggttataataaaggacgtctttccttatcccggttagttgatgttctttcccggaacgcagcaattcattacggtctgtatccgaagaaaggtgccctggaaattggctccgatgcagactttaccgtaattgaccttgactatgaatggaccattgataaagataagatgtacaccatggccaagtacacgccgtttcatggtatgaagcttaaaggcaaacctgttaagaccatcgttcgcggtaaactcgtttatgacgataagaacggtattgttggtaagccaggatacggtcaattcgtaaagcggcaaacgatttctaaattagaacgctggattaagttttaa

SEQ ID NO: 174 - protein, 471 aa, Carboxydothermus hydrogenoformans Z-2901
MGFDLVLKNAKIPQGNRTVDTHILVKDGKIAGFTNDLTGIEVAEVIDAENNLVLPGCIDSHTHFNDPGFTHRENFATGTQAAAAGGVTTIIDMPCCSIPSVRSVDNLEAKLEVIKDKAYVDYAMWGGATGEDVRNNALYNIKEQADYGVVAFKVYMTPSVPTYPPASDAEMLEIFREVAKTGLPVGIHAENLDLCTYHVNKLRNEGRFDGPAWAEARLELAEKVAIQMAISFAEETGARLHIVHMSTGIGGVLVGEAKKRGLDVTAETCPHYLVLNAYESMTKWRQFAKIAPPLRTTRDNEMLWEQLADGRVDFIATDHAPYEIATEKEAEGMDIWTAFPGIPGVETMVPIIISEGYNKGRLSLSRLVDVLSRNAAIHYGLYPKKGALEIGSDADFTVIDLDYEWTIDKDKMYTMAKYTPFHGMKLKGKPVKTIVRGKLVYDDKNGIVGKPGYGQFVKRQTISKLERWIKF

SEQ ID NO: 175 - DNA, 825 bp, Carboxydothermus hydrogenoformans Z-2901
atgtctccgggtaaaaccttttttacaattggtgatgcggcaaagctaattggggtggtgccagcaacccttagaaactgggaaaaggcgggattggtaaaaccgggccgacaaaatgggaactaccgtatttattcccttaaagatattgaaaggctcaaaaaaattaagtacttaatgcgggttaagggttttaatatcgttggagtgaaggaatacctggccgcgcagggggaagaattgccggcagaaccggttaagattgagaaaaagggaccgaggatagcggtcgggcaaaaattaaaggcgcttagagaaaaaaagggtcttaccctggaggaagtttcccagggaactggagtttcggtttcgtatttaagccgaattgaatcggggcaagtaaacgtttctatcgctaccctccagaaactcgccaccttttacgaaaaaaatctcctgtatttttttgagggaatggataccaaagagcaaaaattggtccgggcgggcctaggtcaggtgctggaaactgacgaagaggggattaaggttgagcttttgactgctttaaatgaaccggctatggagccgctcctttacaccgtagctccgggggcgggaagaaatgaaaatatttcccatgaaggggaagagtttgtctacgttttaaaaggggttttagaagtgtggcttgatgaaaccgaacgttacgtggttgggccgggggatagcctttattttaaaagtacccagcaacaccgttggcgtaatattggcgatgaagaactggtagccctctggattaatactccgcctaccttctaa

SEQ ID NO: 176 - protein, 274 aa, Carboxydothermus hydrogenoformans Z-2901
MSPGKTFFTIGDAAKLIGVVPATLRNWEKAGLVKPGRQNGNYRIYSLKDIERLKKIKYLMRVKGFNIVGVKEYLAAQGEELPAEPVKIEKKGPRIAVGQKLKALREKKGLTLEEVSQGTGVSVSYLSRIESGQVNVSIATLQKLATFYEKNLLYFFEGMDTKEQKLVRAGLGQVLETDEEGIKVELLTALNEPAMEPLLYTVAPGAGRNENISHEGEEFVYVLKGVLEVWLDETERYVVGPGDSLYFKSTQQHRWRNIGDEELVALWINTPPTF

SEQ ID NO: 177 - DNA, 336 bp, Escherichia coli CFT073
gtgatagtcttaatactagtttttagaccagtcattggagaacagatgattgatgtcttaggaccggagaaacgcagacggcgtactacacaggaaaagatcgctattgttcagcagagctttgaaccgggaatgacggtctcccttgttgcccggcaacacggtgtggcagccagccagttatttctctggcgcaagcaataccaggagggaagtcttactgctgtggccgcaggagaacaggtcgttcctgcctctgaacttgctgctgccatgaagcagattaaagaactccagcgcctgctgaacaaaacgccggatgtctcccggctctga

SEQ ID NO: 178 - protein, 111 aa, Escherichia coli CFT073
MIVLILVFRPVIGEQMIDVLGPEKRRRRTTQEKIAIVQQSFEPGMTVSLVARQHGVAASQLFLWRKQYQEGSLTAVAAGEQVVPASELAAAMKQIKELQRLLNKTPDVSRL

SEQ ID NO: 179 - DNA, 1065 bp, Escherichia coli CFT073
atgatccaggcccgaaatcagcttcttgctgaagcggcgaaaagtccagcgttaaacatggttcgtcctaacggcatgaacgatgagcctcagttccagattctgattgatgacgagaaagttcaggcgtttaaactgagcatgagcgacgtcgacaacataatgtcagcagcctggggttcgatgtatgtaaatgattttaacgatcgtggacgggtgaaaaaagtctatattcagggcgaacccggctcacgtatatcaccgcaggattttgataaatggtatgtccgtaacagtgatggcgacatggtttcctttgcctcttttgcaacaggcaaatggatttatggctcaccaaaactggagcaatataatggtatctctgctgtcgaaatcctgggggaaccggcaccaggatacagttccggggatgcaatgaaagcaattgaggatattgcggcaagacttcccgaaggtttccatatttcctggacaggtttgtcttttgaggaacgactttcaggttctcaggctcctgcactatatgcactttcactgttgatcgtctttctgtgtctggctgcactgtatgaaagctggagcattcctttctcggtcatgctggttgttccgcttggtgtcctgggggctgtctgtgctactttgttgcgcggccttggtaacgatgtctttttccaggtcggtttattaacaacaatagggctgtctgcgaaaaatgccatacttatcgtggagtttgctcgtgaattgcatgagaaagaaggactaagcattaaagaggctgctgttgaagcggcgagagtgaggttaagaccgataattatgacttcgctggcatttgtaatgggggttatcccactggctgtctcgactggagcaagttccggaagtaaacatgccatcggtactggtgtggttggagggatgatcactgctacgatactggcaatcttttatattcctctcttctatatgttaattgccgggttcttcagccgcagaaataagaaatcatcggataagactgaagctgagcaatcataa

SEQ ID NO: 180 - protein, 354 aa, Escherichia coli CFT073
MIQARNQLLAEAAKSPALNMVRPNGMNDEPQFQILIDDEKVQAFKLSMSDVDNIMSAAWGSMYVNDFNDRGRVKKVYIQGEPGSRISPQDFDKWYVRNSDGDMVSFASFATGKWIYGSPKLEQYNGISAVEILGEPAPGYSSGDAMKAIEDIAARLPEGFHISWTGLSFEERLSGSQAPALYALSLLIVFLCLAALYESWSIPFSVMLVVPLGVLGAVCATLLRGLGNDVFFQVGLLTTIGLSAKNAILIVEFARELHEKEGLSIKEAAVEAARVRLRPIIMTSLAFVMGVIPLAVSTGASSGSKHAIGTGVVGGMITATILAIFYIPLFYMLIAGFFSRRNKKSSDKTEAEQS

SEQ ID NO: 181 - DNA, 570 bp, Escherichia coli CFT073
atgtcaatggagatttcaacagtggtgcggcacacaaaatttgcagcggaagaaacccgcaaacaaatcctggatgtggcagagttctgcttttgtgagacgggcttttcaaagacgacactggagatgattgcggcgcgcgcaggttgtactcggggggccatatactggtatttcaacgaaaaaaaagatcttctgcgacaagtcatcgagcgggtaccactatcattatttgatgagcttacagccatcaaaaatgggagagtttctgaaccggttaaagcgatgtatcgttgcttatcacgtagcctgattaaattacaatataatgtacacttacggaatgtaatttatattgtgtttttttgtgaagaatgtccggatgatataagaataaatttcttacaaaaaatggtggatgtcaataattttgtgaaattactatgttatattttcgaaaaaggtaagttatatagagaaatatgttcggaaattcgtagtgagactctggcgttcctgcttttttctttgtttacgggggggggggcgaagttgcattctgcaacctga

SEQ ID NO: 182 - protein, 189 aa, Escherichia coli CFT073
MSMEISTVVRHTKFAAEETRKQILDVAEFCFCETGFSKTTLEMIAARAGCTRGAIYWYFNEKKDLLRQVIERVPLSLFDELTAIKNGRVSEPVKAMYRCLSRSLIKLQYNVHLRNVIYIVFFCEECPDDIRINFLQKMVDVNNFVKLLCYIFEKGKLYREICSEIRSETLAFLLFSLFTGGGAKLHSAT

SEQ ID NO: 183 - DNA, 210 bp, Escherichia coli CFT073
atgaacgctactataaaaaacagcgctgatatcaatgagcttgctaaatggattgatgaaaatcttgaggtagaactctcaataaatattgaggcaaaaaaagctggatattcaaaatggtatttacagagattgtttaaacatatcattggtatttctattggtaggtatattaataaatgcagcagaagaactacgttctactactga

SEQ ID NO: 184 - protein, 69 aa, Escherichia coli CFT073
MNATIKNSADINELAKWIDENLEVELSINIEAKKAGYSKWYLQRLFKHIIGISIGRYINKCSRRTTFYY

SEQ ID NO: 185 - DNA, 642 bp, Escherichia coli CFT073
gtgggaagttacggacaaagcggcgctattatacgaagacgttggacgttaagccgacgacgcgcagcacagttgaatttattacaggagaaatttatgtctgggaaaagtttaggcttaatcgaaaccgtcgggatgtctgcggcggtagaagccgccgatgccgcaatgaaatccgctaacgttagtctggtaggctatgaattgacgaaaggcggcgggatggtgaccgtgaagctggaaggggaagtgggcgcaattaacgcggcggtagcggcagccatcagcgcggcaagccgggttggcgaggtgtatgcccataaggtgatcgcccgcaccgcgcagcatatcgagcagattattcactctaaagtgaccgccggcgtcgcagaacctcaacctgaagtgcctgctgcacaaccgacactgcaggctgaaaacgcgccttcacagacattcccggtggttaaccttgatacgtcaatcagcgcatcctgtatggatgtcactgatgaaacgctgaagtccgtggagcagcatcaaccggttaaaccctcaatagaaaacactaaacctacaaaatctgatgtaccgcaggaggcagcaaagaaaggtcctcgttccagcggcaagaaaaaataa

SEQ ID NO: 186 - protein, 213 aa, Escherichia coli CFT073
MGSYGQSGAIIRRRWTLSRRRAAQLNLLQEKFMSGKSLGLIETVGMSAAVEAADAAMKSANVSLVGYELTKGGGMVTVKLEGEVGAINAAVAAAISAASRVGEVYAHKVIARTAQHIEQIIHSKVTAGVAEPQPEVPAAQPTLQAENAPSQTFPVVNLDTSISASCMDVTDETLKSVEQHQPVKPSIENTKPTKSDVPQEAAKKGPRSSGKKK

SEQ ID NO: 187 - DNA, 1152 bp, Escherichia coli CFT073
ttgaacgattacctgtttacctccgaatccgttgccgaagggcatcccgataaaatggcggaccaaatttctgatgccattttggatgcgatactcctacaggacccgtggggtaaggttgcctgtgaatgcttggtgaaaactggtgccactattgttgccggagaaatatctacccatgccgccgtggatattgagaagattgtccgcaacaccataaaagagattggttacgaccattcgcgattggggtttgatggcaatacctgctgtgtattaaatatccttggcaaacagtccgccaatattgctgacggcattcgcggccactcgatggaagaactgggggcgggcgatcagggcatcaccttcggttacgcctgtgatgaaacgtcggaactgatgcccgccacgctggtatacgcccatcgtctgatggagcgccaggcgcagttgcgtaaatcccaacggttaccatttttactccctgatgccaaaagccaggttaccctgcgctatcaggataatcgtgttcattcagtagataccgttgtggtgtctacccaacacagccctgacgtttctctggacgcgctacgggaagcggtcatcgaagaaattgttaaacctgtgatgccttcgcactggctcacaccacaaacccgctttctggtgaaccctgcaggcagttttgtgattggcgggccggtgggtgactgcgggctaacggggcgtaaaattattgttgatacctatggcggcgcggcttgccatggcggcggcgcgttttcaggcaaagatccgtcgaaagtcgatcgttccgccgcctacgctgctcgctatgtggcgaaaaacatcgtcgccgctgggcttgcctcacgctgtgaagtccagttgggatgggccatcggcctgccccgccctgtttccgtcaggattaacaccttcggtacacaaacagtgtcatctgaagcgttgctgagaggcgttaacagccatttcgatcttagcgtgttcggcatcattactacgcttgatctgctggtcccccgctatcgtaaaacagcctgctatggtcactttggtcgcgacagctttccgtgggaagttacggacaaagcggcgctattatacgaagacgttggacgttaa

SEQ ID NO: 188 - protein, 383 aa, Escherichia coli CFT073
MNDYLFTSESVAEGHPDKMADQISDAILDAILLQDPWGKVACECLVKTGATIVAGEISTHAAVDIEKIVRNTIKEIGYDHSRLGFDGNTCCVLNILGKQSANIADGIRGHSMEELGAGDQGITFGYACDETSELMPATLVYAHRLMERQAQLRKSQRLPFLLPDAKSQVTLRYQDNRVHSVDTVVVSTQHSPDVSLDALREAVIEEIVKPVMPSHWLTPQTRFLVNPAGSFVIGGPVGDCGLTGRKIIVDTYGGAACHGGGAFSGKDPSKVDRSAAYAARYVAKNIVAAGLASRCEVQLGWAIGLPRPVSVRINTFGTQTVSSEALLRGVNSHFDLSVFGIITTLDLLVPRYRKTACYGHFGRDSFPWEVTDKAALLYEDVGR

SEQ ID NO: 189 - DNA, 1056 bp, Escherichia coli CFT073
atgtttaccattgttatcgttgaagatgagcccatcgaattagaatccctgcggcagattatctcccagtgtgtggaaaacgctgcgatccatgaagcctcaaccggtaaaaaagcgattcacttaattgaccaactgagtcaaatcgatatgatcttagtggacattaatattccgttgccgaacggtaaacaggtgattgaatatctgaagaaaaaaaacagcgatactaaaatcatcgtaatcacggccaatgatgactttgatatagtacgcagcatgtacaaccttaaagtggatgattatctgctcaaaccagtgaaaaaatgtatcttgaccgacaccatcaaaaaaaccctagcattcgacgaaggagaaaatgaaaaatcccgcgccctaaaacagaaagtgttcgccatgatagacgattgcgattacacccagtggcacaactttatttttgacacgctcaacggtgcctgtccggtggatatgatagaagaggataagcgcaaagacgtgatcgattttctggaaatagttagccagtatatgaccgccaaaggggaaaagttaatgccgactaaccgtaaagtcgccgcgctgatcaaagacatcaaccagtatggcatgatggaaagccgctatttccgcatcatgatcagcctgctgaccattagcgaagagctgtttgattacgcattaaaaggctatacaggcaatatcgattttatcgaacgagcgaaattccatattgagaaaaatattctcagaaacttgacgctcgatgacgtggcagcaaaatcgtttgtcagtgcctgctatttgagccgtacctttaagaaaattaccgggttcgggttttcgaactatattgccacgcgtaaaattactatcgccaaatcgttattgcggttcagtgacttacaagtaaataccattgcgctggaactggcataccaggattcaaactatttttgccgcatcttcaaaaaagatactggcatgaccccctctgattatcgaaaagtcgtgtccccgggaattacacggtga

SEQ ID NO: 190 - protein, 351 aa, Escherichia coli CFT073
MFTIVIVEDEPIELESLRQIISQCVENAAIHEASTGKKAIHLIDQLSQIDMILVDINIPLPNGKQVIEYLKKKNSDTKIIVITANDDFDIVRSMYNLKVDDYLLKPVKKCILTDTIKKTLAFDEGENEKSRALKQKVFAMIDDCDYTQWHNFIFDTLNGACPVDMIEEDKRKDVIDFLEIVSQYMTAKGEKLMPTNRKVAALIKDINQYGMMESRYFRIMISLLTISEELFDYALKGYTGNIDFIERAKFHIEKNILRNLTLDDVAAKSFVSACYLSRTFKKITGFGFSNYIATRKITIAKSLLRFSDLQVNTIALELAYQDSNYFCRIFKKDTGMTPSDYRKVVSPGITR

SEQ ID NO: 191 - DNA, 1263 bp, Escherichia coli CFT073
atgattatgtttttaaaaatgcaggctgaaagtatgaagaataaatacaaattaaatgagtttttggatgtaaaacgccttcagaccctgcaggacaacttttcaaaatcaatgatgatcgcgctcgtggttgtggatgagaatggtatcccggtcactaagcccagcggtttttcagacttctgcatgcgttcgcgtctcaacccgacactggcgcaccactgttatgaaagcgacaacgctggtggccgtgccgcgatgcacgctcgcaaaccggtggtttatcgctgccactgcggttttgtcgaattcgctgtcccaatcatgattaacgatcattatctcggtgcttttatttccggtcaggtaaaagtcgaagaagagaaagaacagagcatttcctatattctgaataataatgacgtctggaaagataatccttggttaattaatttgcaccagaatacacgtcgcatgccgtataagcgttttgagtctactgcctcgacgttactacacgtatcgtcttatctggtcgaacaagcgcacaccaataatatccaacgcgaacttcgtaaaaaggatcttgcactggctaatgagttaagaaaacgtgtagagatagaacgctcactacatgaagctgaatttaaagcgctctcttatcagataaatccacactttttatttaacgtattaaataccattggccggttagcttttcttgaagatgcacagcgtaccgaaacaatggtgcacgatttctctgacatgatgcgctatttgttacgtaaaaatagtcacggcctgattactctgcgtaatgaaataaattacgtcaacaactatatgtcgatccaaaaagtgcgtatgagagaccgtttcgattacctgtgcgatatcccggaaaaatatctggatgtagtctgcccgtttttgatcctgcaaccgctggtggaaaacttctttaactacgtagtggagccaagggatagcaatagtcatctgctgatccgtgccacggacgatggcctgaacgtgattattgaagtcactgacaatggcgacggcatcgcaccagataccattaatcgcattttatcaggcgaccaaaaattgcaaaaaggcagtattggcattaacaacataaaaaatagattgaagttgttatttggcgagagctatggcttggaaataatgagccctaacaaacccaggatgggtacaaccattaaacttcggttcccaatgcaggaagcctga

SEQ ID NO: 192 - protein, 420 aa, Escherichia coli CFT073
MIMFLKMQAESMKNKYKLNEFLDVKRLQTLQDNFSKSMMIALVVVDENGIPVTKPSGFSDFCMRSRLNPTLAHHCYESDNAGGRAAMHARKPVVYRCHCGFVEFAVPIMINDHYLGAFISGQVKVEEEKEQSISYILNNNDVWKDNPWLINLHQNTRRMPYKRFESTASTLLHVSSYLVEQAHTNNIQRELRKKDLALANELRKRVEIERSLHEAEFKALSYQINPHFLFNVLNTIGRLAFLEDAQRTETMVHDFSDMMRYLLRKNSHGLITLRNEINYVNNYMSIQKVRMRDRFDYLCDIPEKYLDVVCPFLILQPLVENFFNYVVEPRDSNSHLLIRATDDGLNVIIEVTDNGDGIAPDTINRILSGDQKLQKGSIGINNIKNRLKLLFGESYGLEIMSPNKPRMGTTIKLRFPMQEA

SEQ ID NO: 193 - DNA, 189 bp, Escherichia coli CFT073
atgtggggctttctgacagactgcctcgtcattccattcgtatcgccagtaactggcgtttgtattgtggcagttctggtatacgtttccctgtgtatctgcactggttcagcaaggtttgaaaaggagtatcccttgcaaataaccgaagcattactttcagagccggagctgtttttgttgctgtga

SEQ ID NO: 194 - protein, 62 aa, Escherichia coli CFT073
MWGFLTDCLVIPFVSPVTGVCIVAVLVYVSLCICTGSARFEKEYPLQITEALLSEPELFLLL

SEQ ID NO: 195 - DNA, 135 bp, Escherichia coli CFT073
gtggtgatcgttcatgtggggctttctgacagactgcctcgtcattccattcgtatcgccagtaactggcgtttgtattgtggcagttctggtatacgtttccctgtgtatctgcactggttcagcaaggtttga

SEQ ID NO: 196 - protein, 44 aa, Escherichia coli CFT073
MVIVHVGLSDRLPRHSIRIASNWRLYCGSSGIRFPVYLHWFSKV

SEQ ID NO: 197 - DNA, 321 bp, Escherichia coli CFT073
gtgggatcggaagttcctcgggtacagtgtgacatggcacaaacaggcgaagctgaagatagccctgacgagcgtgaacaggctgaaggagaaagtccacagtctgacgacgggaaaccggagcaaatcagtgaaagcgacaatcaatgctctgacaccagtgctgtgtggatggataagctacttcaggctgacggaagtcagaggagtgctggaggagctggatggctggatcaaacggaaactgcgttgcttgttgtagcggcagtggaagagaccgctaacccgggcaaagaacctgcaaagagcaggactgagtaa

SEQ ID NO: 198 - protein, 106 aa, Escherichia coli CFT073
MGSEVPRVQCDMAQTGEAEDSPDEREQAEGESPQSDDGKPEQISESDNQCSDTSAVWMDKLLQADGSQRSAGGAGWLDQTETALLVVAAVEETANPGKEPAKSRTE

SEQ ID NO: 199 - DNA, 522 bp, Escherichia coli CFT073
atggttaaagacgggcaaagggagaaacggcaggcgggcatgctgcagggcggcccactgtcgccgttactgtcgaacatcctgctggatgaactggataaagaactggagcgtcgtggacacagcttctgccgctacgcagacgactgcaacatctacgtaagcagccggaaagcgggcgaccatctgctgaagaacatcagggcgttcgtggagaacaaactgaaggtgaatgagaagaagagcgcggtggcgcgcccgtgggatcggaagttcctcgggtacagtgtgacatggcacaaacaggcgaagctgaagatagccctgacgagcgtgaacaggctgaaggagaaagtccacagtctgacgacgggaaaccggagcaaatcagtgaaagcgacaatcaatgctctgacaccagtgctgtgtggatggataagctacttcaggctgacggaagtcagaggagtgctggaggagctggatggctggatcaaacggaaactgcgttgcttgttgtag

SEQ ID NO: 200 - protein, 173 aa, Escherichia coli CFT073
MVKDGQREKRQAGMLQGGPLSPLLSNILLDELDKELERRGHSFCRYADDCNIYVSSRKAGDHLLKNIRAFVENKLKVNEKKSAVARPWDRKFLGYSVTWHKQAKLKIALTSVNRLKEKVHSLTTGNRSKSVKATINALTPVLCGWISYFRLTEVRGVLEELDGWIKRKLRCLL

SEQ ID NO: 201 - protein, 540 aa, Escherichia coli CFT073
ATGATGATTAATGAAGCACAAGCGCAGGCAACTGCGACCAGCGGCAGAGGAGACGGACAGTATCCGTCAGGGCTGCATGATGGCGCTGAAATCAGCACGGCGGCGGGTGGGCAAACGAAAGCGGAAGTGCCGCTGACGATGGAAGCGGTGATAACGAGAGAAAACCTGATGCTGGCTTATCAGCGCGTGGTGGAAAACAAAGGCACGGCGGGGGTGGATAACCTCAGCGTGGCGGAGTTGAAACCGTGGCTGAAGAAGAACTGGCGCAGCGTCAGGCAGGCATTGATTGACGGAAACTACCAGCCGCGGGCAATACGCCGGATGGATATCCCGAAGCCGGATGGCGGCGTGAGAACCTCAGGCATCCCGACGGTGGTGGACAGGCTTATCCAGCAGGCGGTGCAACAGGCACAGCGTTACATACGGGGTGGCAAACGGTGGGTGGTGGATATGGATCTGGAGAAGTTCTTCGACCGGGTGGATCACAGACTCCTGATGACGCGTCTGGCCAGAACGATWAAGGACAGGCGGGTGCTGTGA

SEQ ID NO: 202 - protein, 179 aa, Escherichia coli CFT073
MMINEAQAQATATSGRGDGQYPSGLHDGAEISTAAGGQTKAEVPLTMEAVITRENLMLAYQRVVENKGTAGVDNLSVAELKPWLKKNWRSVRQALIDGNYQPRAIRRMDIPKPDGGVRTSGIPTVVDRLIQQAVQQAQRYIRGGKRWVVDMDLEKFFDRVDHRLLMTRLARTIKDRRVL

SEQ ID NO: 203 - DNA, 906 bp, Escherichia coli CFT073
atgaatagcttagatattgtagttgccttcggcggcggcatatttggtgcggctgttggcgcgctggcggcgtttgaattcgttgggcttctggttatcgccatgacggtagtgcaaattattaccggagcatcatcggactttattacttttccgtttggactgtttggcccgcacaccggcggctttgccgctggggttgcggcgacggcgtatgcagcgaagaaaggcaagctgggttccgggcgtgatatcactgccgggttgagcggtctggcggcttacgatgtgctgctggtaggcggggtttttggggcggttggttacatcatcgcctgggggttgaaccagattccggccttcccgtccggcaatgcttggaccgataccgtggcactaaccgtggtgatttctggcgtggtctcgcgtctggttttcggtaaaactggcctgtttggaaaaccggagcagggaattcgtcactgctatccgccgcaggataagtgctggataccttaccatagccgcattccgcagctttccgtgctgggcttgggtattggcttgatggcaggctttttaggcctgaagtttggcggcaacggcgcgctgctggcgtttggtatttccgcgttctcactgattttcctgcatttcaatactcaggtaccggtgtcacatcatatttcgctgcctgccgcgttggtagcggtgccatcaggtagcctgatttgggctgctatcgttggcataatttgcgcgatattgggtgaactgatgtcgcgtatcttcctgatccacggcgatacacatattgacccgccggcgatggtcatcaccattatgaccacgatgattaatctgttggcgaccattggattatttaccttggttcccctgttttaa

SEQ ID NO: 204 - protein, 301 aa, Escherichia coli CFT073
MNSLDIVVAFGGGIFGAAVGALAAFEFVGLLVIAMTVVQIITGASSDFITFPFGLFGPHTGGFAAGVAATAYAAKKGKLGSGRDITAGLSGLAAYDVLLVGGVFGAVGYIIAWGLNQIPAFPSGNAWTDTVALTVVISGVVSRLVFGKTGLFGKPEQGIRHCYPPQDKCWIPYHSRIPQLSVLGLGIGLMAGFLGLKFGGNGALLAFGISAFSLIFLHFNTQVPVSHHISLPAALVAVPSGSLIWAAIVGIICAILGELMSRIFLIHGDTHIDPPAMVITIMTTMINLLATIGLFTLVPLF

SEQ ID NO: 205 - DNA, 918 bp, Escherichia coli CFT073
atgaataaagttgagtacgaaaccgaaggcgtcatatttaatattcaacgctattctttgcatgatggtccaggcattcgaaccattcctttttttaaaggctgcccgctgtcctgcaaatggtgtagtaatcctgaatcacaacgtcacagcccagagttattatttaaaaagaatgattgcatccgctgtggaaaatgtattgatgcttgcccacaacaggctctttccactactaatgcctggtttatcaatcgcgaccgctgtattcagtgtgggaaatgtactgagatttgccctacccgtgcgctggaaatgaagggcaagcgtatgtcggtaacggcagtgatgcgcgaactggaaaaagaagagaatttataccggcgttcaggcggcgggattaccctgtccggtggtgaaccgctggcgcagccggaatttgcccgcgagctgcttaaagcctgtaaagccaaaggctggcacaccgctattgaaacaagcggcttcaccaccaaagcggtgattgatgaggtatttccctatgtcgatcttgctctgaccgatattaaagccatcgatccggaaatccatgagcgcaacaccggcgtgaataacagagtgattctggagaatctgctgcgcatctcctttttaaccaaagtggttgtgcgtattcctgtgatcccaggagtgaatgacaattcgcaggaaatccataatattgcggagttcgcccgcctgatgcagaacgtcgataccattcacttattgccttatcacagcttcggtgaaaataaatataatctgcttggtcgccagtatccgatgggcgatacaaaaagtatcgaagaatcccaaatggcagagttaaaagcaatggttgaatccttaggttttaactgccatatcggcggttaa

SEQ ID NO: 206 - protein, 305 aa, Escherichia coli CFT073
MNKVEYETEGVIFNIQRYSLHDGPGIRTIPFFKGCPLSCKWCSNPESQRHSPELLFKKNDCIRCGKCIDACPQQALSTTNAWFINRDRCIQCGKCTEICPTRALEMKGKRMSVTAVMRELEKEENLYRRSGGGITLSGGEPLAQPEFARELLKACKAKGWHTAIETSGFTTKAVIDEVFPYVDLALTDIKAIDPEIHERNTGVNNRVILENLLRISFLTKVVVRIPVIPGVNDNSQEIHNIAEFARLMQNVDTIHLLPYHSFGENKYNLLGRQYPMGDTKSIEESQMAELKAMVESLGFNCHIGG

SEQ ID NO: 207 - DNA, 2553 bp, Escherichia coli CFT073
atgttagagaaaggcttttctaatccgacagaccgtgttgtaagactgagaaatatgatcctgacggcgaagccgtatgtggaatcagaacgcgcggtgttagcaaccgaagcatataaagaaacagaacaactgcccgcgattatgcgtcgtgctaaagtggtggaaaaaatctttaaccaattaccggtaacaattcgcccagacgaattaatcgttggagcggtaactattaatcctcgctcaactgaaatctgccctgagttctcctacgactgggtggaaaaagagtttgagactatggaacaccgtattgccgacccgtttgttatcccgaaaaagactgctcaggagcttcatgaagcatttaaatactggccgggtaaaactaccagtgctctggcggcatcttacatgtcagaaggcactaaagagagtatggcgagcggtgtattcactgttggtaactacttcttcgggggcgtcggtcatgtcagtgttgactacggtaaagtgctgaaaattggtttccgtggtatcattaatgaagttagccgtgccttggaatcattagatcgcactgaaccaggatatataaagaaagaacagttctataatgcggtgctgatcagttataacgcagcgatccgtttcgcccatcgttacgctgaagaagcatcccgtctggcgcagcaggagagcaatccgacccgtaaacgcgaactggagcagattgctcaaaactgtactcgcgtgccggaatacggtgctaccacattctgggaagcatgccagacattctggtttattcagagcatgttacagattgaatccagcggtcattctatctccccggggcgtttcgaccagtatatgtacccgtatctggagtcggacaaatctatctcgcgtgaattcgcgcaggaactggtggattgctgctggatcaagcttaacgacattaacaaaacgcgtgacgaagtctctgcccaggcgtttgccggttacgcagtgttccagaacctgtgctgtggcggccagacagaagacggtcgcgacgcaactaacgatctgagctacatgtgtatggaagcgactgcccatgtgcgtctgccgcagccatccttctcaatccgcgtatggcagggtactccggatgagtttctgtatcgcgcttgcgagctggtgcgtatgggcctgggcgttccggcaatgtacaacgatgaagtaatcatcccggcgctgcagaaccgtggcatttcgctgcgtgatgcgcgtgattactgtatcatcggctgcgtagagccgcaggcaccgcatcgcaccgagggctggcatgacgccgcgttctttaacgttgcaaaagtgctggaaatcaccctgaacaacggtcgcgttggcaataaacagctaggcccagtgactggcgaactgactcagttcaccagcatggaggacttctacaccgcgttccagaaacagatggcgcacttcgttcatcaactggttgaagcctgtaacagcgtggatattgcccacggcgaacgctgcccgctgccgttcctatcagcactggtcgacgactgtatcggccgtggtaaatctctccaggaaggcggggcgatttacaactttactgggccgcaagcattcggcgtagccgataccggcgactccgtctatgccatccagaaacaggtattcgaagatcgtaaactgtctttgagcgaactgaaaagcgcactggacgccaacttcggttatccggtgggtgcgaacccgcacactccagcggcgaaatcctcgctcaacgagcaggatatctacgatgtggtgaaacgcatcattgaacagcatggcgcgctggatccggcagcgattaaaaacgaagtttatcgccagctgacttccggcagtgcagcaccggtgcaatccggcactatgtcccgtcacgaggagatccgtcgtattctggaaaacacaccgtgcttcggtaacgacatcgatgacgtggatttagtagcgcgtaaatgtgcgctgatctactgccaggaagttgagaaatataccaacccgcgcggtggccagttccaggctggtatctatccggtgtctgcgaacgtgctgtttggtaaagacgttgccgcactgccggatggccgtctggcgaaagagccgttggcggatggcgtatctccacgtcagggtaaagacacccttggcccaaccgccgcagccaactcagttgccaaactggatcactttatcgcctccaacggtacgctctataatcagaaattcctgccgtcttctttggctggcgagaacggtctgcgcaacttcagcggcctgatacgtcactacttcgataagaaagggatgcacgttcaatttaacgttatcgaccgcaacactttgatcgaagcccagaaaaatcctgagcaacatcaggatctggtggtacgcgttgcgggctatagcgcccagtgggtagttttagcgaaagaagttcaggacgacataatcagccgtactgagcaacaactgtcgtaa

SEQ ID NO: 208 - protein, 850 aa, Escherichia coli CFT073
MLEKGFSNPTDRVVRLRNMILTAKPYVESERAVLATEAYKETEQLPAIMRRAKVVEKIFNQLPVTIRPDELIVGAVTINPRSTEICPEFSYDWVEKEFETMEHRIADPFVIPKKTAQELHEAFKYWPGKTTSALAASYMSEGTKESMASGVFTVGNYFFGGVGHVSVDYGKVLKIGFRGIINEVSRALESLDRTEPGYIKKEQFYNAVLISYNAAIRFAHRYAEEASRLAQQESNPTRKRELEQIAQNCTRVPEYGATTFWEACQTFWFIQSMLQIESSGHSISPGRFDQYMYPYLESDKSISREFAQELVDCCWIKLNDINKTRDEVSAQAFAGYAVFQNLCCGGQTEDGRDATNDLSYMCMEATAHVRLPQPSFSIRVWQGTPDEFLYRACELVRMGLGVPAMYNDEVIIPALQNRGISLRDARDYCIIGCVEPQAPHRTEGWHDAAFFNVAKVLEITLNNGRVGNKQLGPVTGELTQFTSMEDFYTAFQKQMAHFVHQLVEACNSVDIAHGERCPLPFLSALVDDCIGRGKSLQEGGAIYNFTGPQAFGVADTGDSVYAIQKQVFEDRKLSLSELKSALDANFGYPVGANPHTPAAKSSLNEQDIYDVVKRIIEQHGALDPAAIKNEVYRQLTSGSAAPVQSGTMSRHEEIRRILENTPCFGNDIDDVDLVARKCALIYCQEVEKYTNPRGGQFQAGIYPVSANVLFGKDVAALPDGRLAKEPLADGVSPRQGKDTLGPTAAANSVAKLDHFIASNGTLYNQKFLPSSLAGENGLRNFSGLIRHYFDKKGMHVQFNVIDRNTLIEAQKNPEQHQDLVVRVAGYSAQWVVLAKEVQDDIISRTEQQLS

SEQ ID NO: 209 - DNA, 612 bp, Escherichia coli CFT073
ttgaggaagacgataaccagttttgagagtccgcttatgaagaagatattacttatcacaggcgatttctctgaagactatgaagtcatggtgccatggcaggcattaaacatgttaggtttcagagtggatgtagtgtgtccgggaaaacgtaccggcgagtttattaaaaccgcgattcatgattttgaaggtgatcagacctacaccgaaaaacccggacatctttttagattaactgcatcatttgatgacataaggttacaggaatatagtggtgtttatatttctggtgggcgttcatcggaatacttgcgattaaataagtcagtattggatatcgtgcattacgcgatgaatttaacattacctgttgctgcaatttgtcatggcccacaaattctggccgctgctggggtattaaaaggccggaaactgacgggatattttacggtaaaaccggaagtggaaatggcgggtggccagtgggtcactgccgcagatgatgaagccattgtggatggtaatttaataaccgcgactacctggatggggcatccagcaatattacgtcactttattactcaaatgggcactagcattattcattaa

SEQ ID NO: 210 - protein, 203 aa, Escherichia coli CFT073
MRKTITSFESPLMKKILLITGDFSEDYEVMVPWQALNMLGFRVDVVCPGKRTGEFIKTAIHDFEGDQTYTEKPGHLFRLTASFDDIRLQEYSGVYISGGRSSEYLRLNKSVLDIVHYAMNLTLPVAAICHGPQILAAAGVLKGRKLTGYFTVKPEVEMAGGQWVTAADDEAIVDGNLITATTWMGHPAILRHFITQMGTSIIH

SEQ ID NO: 211 - DNA, 300 bp, Escherichia coli CFT073
atgaaaaaacgaatcataaacgcaccgaccccggatattttggctatgttgaaacggcgtatgcccggggagtttcgttcgcgtttggatttgattcgcatcgacgccattggtttgttaatactgccggttccggatctctatttttatgccgacgtagccagtaaaagcgccaatgtggtggtatcagaaatctttggcagttgccctcagcatatcaccacattggccatttttggcgaagtcgcggcggtgcatgaagccatgcgaatcattgaggaagacgataaccagttttga

SEQ ID NO: 212 - protein, 99 aa, Escherichia coli CFT073
MKKRIINAPTPDILAMLKRRMPGEFRSRLDLIRIDAIGLLILPVPDLYFYADVASKSANVVVSEIFGSCPQHITTLAIFGEVAAVHEAMRIIEEDDNQF

SEQ ID NO: 213 - DNA, 1518 bp, Escherichia coli CFT073
atgaatgatattgaaatcgctcaggctgtctcgaccatcctgagcaaattcaccaaagcaacaccggatgaagctcccgccacgtcagaagcagcgcgggtcgacgggttggatgaaattgtcgctaaggcgttggcgcagcactcttccgtgcgcgacgccagtgcgatctctcaggtagcgaaggtagcgaatgctagcactggagcattcgataccatggatgaggcgatttccgccgccgtcttggcacaggtgcagtatcgccactgttctatgcaagaccgcgcctcgtttatcaatggcattcgcgatgtcttcctgcaggaagatgtgctgtgtgccctttcccgtatggcggtggaagagaccggcatggggaattacgaggacaaactgatcaaaaaccgcgtcgcagcgctgaaaacgccaggtatcgaagatctgaccaccagcgcggtttccggagacgggggtttaacgttgatcgaatactctgcgttcggagtgattggttcgattacaccaacgactaacccgaccgaaaccattatcaacaacagcataggcatgctggcggcaggcaacactgtggtgttcagtccacatccgcgctcgcgcaaagtgtcgctgtacgcggttgagctgatcaacaacaagcttgcccagttgggcgcaccggcgaacatggtggtaacggtgaccaaaccgtccatcgacaataccaacgtcctgatcaacgacccacgtatcaacatgctggtagcgactggcggtccagccatcgtgaaaaccgtgatgtcatcaggtaaaaaagcgattggtgcaggcgcaggtaacccgccagctgtggtagatgaaacggcggatatcgaaaaagcagcccgcgacatcattaagggctgtagcttcgacaacaacctgccgtgcgtggcggaaaaagaggtgattgttgtgaaccaggtagcggactatctgattcactgcatgaagaaaagcggtgcctatctgttgtgcgataagaagttaagtcaacaactgcaatcgttggtgcttaatgaaaaaggcactgggccgaataccgcctttgtcggcaaagatgcgcgctatatcctgcaacaactgggaatccaggttggcgacgatatcaaagttatcttaattgaggctgagaaaacacatccgtttgtggtgcatgagctgatgatgccggtcctgccggtggtgcgcgtagacaatgttgatgaagccattgagctggcggtgaaagtggagcacggcaatcgtcataccgcggttatgcactccaccaacgtcgaaaagctgaccaaaatggcgcgcctgatccagaccaccatctttgttaaaaatggtccctcttatgcagggctgggggtgggcggtgaagggcatgccacctttacgattgccggaccgaccggcgagggacttacgtcagcgcgttcgtttgcacgccgtcgtcgctgtgtaatggttgaagcgctgaatattcgctaa

SEQ ID NO: 214 - protein, 505 aa, Escherichia coli CFT073
MNDIEIAQAVSTILSKFTKATPDEAPATSEAARVDGLDEIVAKALAQHSSVRDASAISQVAKVANASTGAFDTMDEAISAAVLAQVQYRHCSMQDRASFINGIRDVFLQEDVLCALSRMAVEETGMGNYEDKLIKNRVAALKTPGIEDLTTSAVSGDGGLTLIEYSAFGVIGSITPTTNPTETIINNSIGMLAAGNTVVFSPHPRSRKVSLYAVELINNKLAQLGAPANMVVTVTKPSIDNTNVLINDPRINMLVATGGPAIVKTVMSSGKKAIGAGAGNPPAVVDETADIEKAARDIIKGCSFDNNLPCVAEKEVIVVNQVADYLIHCMKKSGAYLLCDKKLSQQLQSLVLNEKGTGPNTAFVGKDARYILQQLGIQVGDDIKVILIEAEKTHPFVVHELMMPVLPVVRVDNVDEAIELAVKVEHGNRHTAVMHSTNVEKLTKMARLIQTTIFVKNGPSYAGLGVGGEGHATFTIAGPTGEGLTSARSFARRRRCVMVEALNIR

SEQ ID NO: 215 - DNA, 786 bp, Escherichia coli CFT073
atgagagataatcttgttgagcagattatatctgacgtaatgaataaacaaaccgatatctcaccggaagctaaaacagcagcaaatttcgctggttgcggtattacggaatttgtcggcactgcgttgggccacactatcggcctagtgattgccaatgttgataatcaattgcatgaagtcatgaatatcgacaagaaatatcgctctatcggtattcttggcgcacgtactggcgcaggcccgcaaatttttgcggctgacgaagcgattaaagcaaccaacagcgaaattatttctattgagctggcccgcgataccgaaggaggtggcggacacggttgcttaattatttttggtgcgtctgatgtttccgacgtcaggcgtgcggttgaagtggcgctgtctgaaattgaacgcaccatgggtgacgtttatggctcgtcagccggacatcttgaattccagtacaccgctcgtgccagctacgcgctgaataaagcgctgggtgcgccgattggtaaatccttcgggatgacctgtgcctcgcctgcggcgattggcctagtgattgccgacgctgcggcgaaatccgccgtgattgacccggtgggttatgccagcccgtcgcaaggcaccagctttagtaacgaagtgatcttcaccttctccggtgattccggtgcagtacgtcaggcggtgattgccgcgcgtgaagtcggtctacaactgctctccacgttagatccggtggaaattaaatccaccacgacgccatatatctaa

SEQ ID NO: 216 - protein, 261 aa, Escherichia coli CFT073
MRDNLVEQIISDVMNKQTDISPEAKTAANFAGCGITEFVGTALGHTIGLVIANVDNQLHEVMNIDKKYRSIGILGARTGAGPQIFAADEAIKATNSEIISIELARDTEGGGGHGCLIIFGASDVSDVRRAVEVALSEIERTMGDVYGSSAGHLEFQYTARASYALNKALGAPIGKSFGMTCASPAAIGLVIADAAAKSAVIDPVGYASPSQGTSFSNEVIFTFSGDSGAVRQAVIAAREVGLQLLSTLDPVEIKSTTTPYI

SEQ ID NO: 217 - DNA, 252 bp, Escherichia coli CFT073
ttgctattcctctgtgcacgttttctttctatcggaaatattgaggtcgttatgcaacaagaagcattaggaatggttgaaacgaaaggtctggtttctgcaattgaagctgcagataccatggtgaaatctgccaacgtgaccctagtgggttatgaaaaaatcggctccggcttggtgactgtgatggttcgcggcgactgttggcgcagtgaaagccgcgacagatgcgggctccgctgctgcgagtaa

SEQ ID NO: 218 - protein, 83 aa, Escherichia coli CFT073
MLFLCARFLSIGNIEVVMQQEALGMVETKGLVSAIEAADTMVKSANVTLVGYEKIGSGLVTVMVRGDCWRSESRDRCGLRCCE

SEQ ID NO: 219 - DNA, 180 bp, Escherichia coli CFT073
atgagccacgcggtgcccaacggcgttgatggcttccaacagttgctgttcgtcgagcttcgcgaagagcactttgagcgcatgctgatggctggcgtcatccagcgcgacagtggatttatggccgtctcggtctttaaacgttatgacagcatgatcaatacccagtcgttccgctag

SEQ ID NO: 220 - protein, 59 aa, Escherichia coli CFT073
MSHAVPNGVDGFQQLLFVELREEHFERMLMAGVIQRDSGFMAVSVFKRYDSMINTQSFR

SEQ ID NO: 221 - DNA, 1221 bp, Escherichia coli CFT073
ttgcagtccatttcagggggcatcatgtctttagcttgtgtattagtgattaattgtggttcctcatcaatgaaattctccgtcattcctcaggatgcagatcagccgttgctgtcgggcctagcggaacgactgggtattgatcatgctgtcataacgtttaaagaccgagacggccataaatccactgtcgcgctggatgacgccagccatcagcatgcgctcaaagtgctcttcgcgaagctcgacgaacagcaactgttggaagccatcaacgccgttgggcaccgcgtggctcatggcggcagcgacttcaaaagatcagtactggttaccgatgatgtgatcgaaaaagtccgcgcgctgtcggtgctggcccctttgcataaccctgccaacctgattggtattgaagcggctcgggctctgttgcccgcgttgccgcatattgcggtgttcgatactgcgttccaccagaccttgtctccggctgcttacacctatgcgatcccgctggagttccagcaagattatatggtgcgacgttacggctttcacggaacatctcaccgctatattgccgccgaggcgcttgcatcactagatctcgacccggcggatcatggcatcgtgattgcccacttgggcaacggttcatcgctatgtgcggtgcaaaacggcacgagcattgacacctcaatgggtatgaccccgctggaagggctggtaatgggcacgcgctgcggggatcttgattttggtgtcgtcgcatatctggcgaaacgcacaggtcaaacgttcgacacgctgtacaaaatgctcaataaccagtccggcctaatggggatttccggcttatccagcgattgccgcacccttcagcaggcgcgtgatgagggccacgaacgggcagcgttagccatcgacgtgttagtacatcgtctcgcacgacatatcggcggccacgtgacctcgcttaaacgcttcgatgcgctgattttcaccggtggaattggcgaaaactcggcgttaattcgagaacttaccgtgcaacgccttcaggcgctgggattggaactggataaagaacgtaaccagcagctgttcggcggacgtagcggactgatttctaaaaccgacaccacgaagattgcggtcatcccaaccaatgaagaaaaaatgattgctatagatgcagcggagattgcccgcacggcataa

SEQ ID NO: 222 - protein, 406 aa, Escherichia coli CFT073
MQSISGGIMSLACVLVINCGSSSMKFSVIPQDADQPLLSGLAERLGIDHAVITFKDRDGHKSTVALDDASHQHALKVLFAKLDEQQLLEAINAVGHRVAHGGSDFKRSVLVTDDVIEKVRALSVLAPLHNPANLIGIEAARALLPALPHIAVFDTAFHQTLSPAAYTYAIPLEFQQDYMVRRYGFHGTSHRYIAAEALASLDLDPADHGIVIAHLGNGSSLCAVQNGTSIDTSMGMTPLEGLVMGTRCGDLDFGVVAYLAKRTGQTFDTLYKMLNNQSGLMGISGLSSDCRTLQQARDEGHERAALAIDVLVHRLARHIGGHVTSLKRFDALIFTGGIGENSALIRELTVQRLQALGLELDKERNQQLFGGRSGLISKTDTTKIAVIPTNEEKMIAIDAAEIARTA

SEQ ID NO: 223 - DNA, 498 bp, Escherichia coli CFT073
atgtctgcgaatgaggcttcactcgacaactggattaacgaggctattgccacgcagttaccggaactccggatgtcgctgagcctggaggacagtgaactgctggcaaagttggtccgggaaatggcacagtccagcaatgtatcgatcgtttttagcctagtggatgcctgcggtcagcagcgttttttcttcagcatggataacgccctgctggtcagccataccttggcaccacaaaaggcctggaccgcggtagctctcaaaatgccaactcacgaactggcaacgctggtacagccgggtggtgatttgtacggccttgagaaagaaaaagatatctgctgcttcggcggtggttttccctgctggtcgggcaggcgcttactaggcggcatcggcatcagcggcggcagtgttgaggaagatatgctcatcgcccgccaggcgatggcgcagtttagcgttctgcgttatcccctcacaacaacccgttaa

SEQ ID NO: 224 - protein, 165 aa, Escherichia coli CFT073
MSANEASLDNWINEAIATQLPELRMSLSLEDSELLAKLVREMAQSSNVSIVFSLVDACGQQRFFFSMDNALLVSHTLAPQKAWTAVALKMPTHELATLVQPGGDLYGLEKEKDICCFGGGFPCWSGRRLLGGIGISGGSVEEDMLIARQAMAQFSVLRYPLTTTR

SEQ ID NO: 225 - DNA, 270 bp, Escherichia coli CFT073
atgtacctcgctaaagttactggcgcattggtttccaccaccaaacacgcctcgctgaatggctcaaaactgctgatagtggcgcggctcgatgaaaactatcagccgactgtccatgcccaggtggcagttgatactgtcggcgcgggcaatggagagattgtgatcatcaccaccggcagttcggcgcgtatgagcaacaacaaagatcactcggtgattgacgctgccgtggtgggtatcgtcgactcgctcgaacttaacggttaa

SEQ ID NO: 226 - protein, 89 aa, Escherichia coli CFT073
MYLAKVTGALVSTTKHASLNGSKLLIVARLDENYQPTVHAQVAVDTVGAGNGEIVIITTGSSARMSNNKDHSVIDAAVVGIVDSLELNG

SEQ ID NO: 227 - DNA, 726 bp, Escherichia coli CFT073
atgcggaccaggggtaaatcaatggacaatcaaaccttatcgcaactgctggaccgggtcatcgctgaagtgttggcacaatccgtcgcgcagaaaaatgtctgcgtagtggtgactggtgaggatatctcctcgctgccggaaacgctgaactgccttgaggcgcttgagctggcgggttatcagttgtgggtaaatttttctcacagcgccagccagtcggcgctgaaatctgtctgcatggatgcgctaattcagcgtggttctcgtgctggatttgacagatcgccgcctcactatgaggtgctctatctgcctgcgctctctgtcaacagcatgagcaaaattgcgctgggcattcgcgataatctggcctgtgaaactgtatttcaggcgttacagcaccgtaaacagattatcgccacgctgcatcaacaatgcgtcgatagcgaattaccgatgccactgctgtcttgtctggaaggttacgctcaggtcctagagagctatggcattacgcttttcggtaaacgtgcagcccatgtcaagtcggtgcaaggaagccaatccaccctgacagtagccggtaaaaaacgtttaatcacccagagcgatatccgcctactgaccattggcacagtgctgcgcattgagagcgacacgctgattacccctgctgccagagatgaaatccagcggcgtaatctcactgttatccatggttaa

SEQ ID NO: 228 - protein, 241 aa, Escherichia coli CFT073
MRTRGKSMDNQTLSQLLDRVIAEVLAQSVAQKNVCVVVTGEDISSLPETLNCLEALELAGYQLWVNFSHSASQSALKSVCMDALIQRGSRAGFDRSPPHYEVLYLPALSVNSMSKIALGIRDNLACETVFQALQHRKQIIATLHQQCVDSELPMPLLSCLEGYAQVLESYGITLFGKRAAHVKSVQGSQSTLTVAGKKRLITQSDIRLLTIGTVLRIESDTLITPAARDEIQRRNLTVIHG

SEQ ID NO: 229 - DNA, 759 bp, Escherichia coli CFT073
atgtcggccctactccggcgcgttgaaggtgggggggatctcggtaccgccaatatcgcaatcgtggtgctggatgaagataaccagccggtggcaggggtaatgtatccctccaatgtggtgaaagacggcgtggtggtggattacctgaccgccagccgggtagtagcacgtctcaaacaaattcttgaacagaaacagggctgcacgctggagcgcgcggcgatcgcagtcccaccggggatctctgaaggcaacacaaaagtgatcgtcaacgtagtggagttggcgggttttatcgtgacccaagtactagatgaaccggtagccgctgccagcgcgctgaatattaaaaacggggcggtggtggatgtcggaggaggcaccaccggcatgagcattttgaaaagcggtaaagtgacgttcagtgccgatgagcccaccggtggaagccatatgaagttggtgatcgctggcgcgctgggcttgccttatgccgaggcggaagaaatgaaaaaaaacgggcaggaagcgcaggtctttaccctggtgctaccggtggcccagaaaatggccagcttggtgtcgggatggttcgctacccagcaggtaaaaaatatttatttggtaggtggcgcgagcagcttcagccagtttgccaacgtgttcagtaaacaaaccggtaaaaatgtgattccttcggcagagccactattggtcacaccattaggcatcgccatgaatgcggaccaggggtaa

SEQ ID NO: 230 - protein, 252 aa, Escherichia coli CFT073
MSALLRRVEGGGDLGTANIAIVVLDEDNQPVAGVMYPSNVVKDGVVVDYLTASRVVARLKQILEQKQGCTLERAAIAVPPGISEGNTKVIVNVVELAGFIVTQVLDEPVAAASALNIKNGAVVDVGGGTTGMSILKSGKVTFSADEPTGGSHMKLVIAGALGLPYAEAEEMKKNGQEAQVFTLVLPVAQKMASLVSGWFATQQVKNIYLVGGASSFSQFANVFSKQTGKNVIPSAEPLLVTPLGIAMNADQG

SEQ ID NO: 231 - DNA, 687 bp, Escherichia coli CFT073
atgaattacaccgaacaacaagccgagtggattacccaacaaattttgcaggaacttgccaccagtaaaaaaacggcagcgcctgctgccgcgcccgtcgcgctgaatattccggtgggcgtgtccaaccgccatgttcatctgtgccgtgaagatatggacattctgtttggctacggctctacgctaacccgttctaaagcgttgaaacagcccggtcagtatgccgccgaagagatggtgacgctgcgcgggccaaaaggcgagctcaacaaagtgcgcgtgttagggccactgcgtaatgccacgcaggtggaaatctctgtggccgacggctttgcgctgggcactaaagctccggtgcgcatgtcgggggatctgctggattcgccgggcattgaaatcatcggtccgaaagggcgggtggtgaaacacaacggcatgattgtcgcctggcgccatatccatatctcgcccgaagaagccgaactgcacggcctgcatgacggaatggaaatcgatgtgcaaacaaacggtccgcgcggtggtgtgctcagccatgtagtggtacgcgtcacggcggatgcagtgctggaactgcatattgatatggaagaagctaacggcgtcggtctgcgtaatggcgataccgttcgcggcataaaacaggctgcgcgccatggctaa

SEQ ID NO: 232 - protein, 228 aa, Escherichia coli CFT073
MNYTEQQAEWITQQILQELATSKKTAAPAAAPVALNIPVGVSNRHVHLCREDMDILFGYGSTLTRSKALKQPGQYAAEEMVTLRGPKGELNKVRVLGPLRNATQVEISVADGFALGTKAPVRMSGDLLDSPGIEIIGPKGRVVKHNGMIVAWRHIHISPEEAELHGLHDGMEIDVQTNGPRGGVLSHVVVRVTADAVLELHIDMEEANGVGLRNGDTVRGIKQAARHG

SEQ ID NO: 233 - DNA, 1119 bp, Escherichia coli CFT073
atggcccgctattatttttcgtgccccaaaatttattttggtgaagaggcaataacctctctatgccaatttaataataaacgagtcggtattgtcaccgatgattttatgatgtcatcaggtaaaactcgttatttaataagccatatgcctgaggcatcggtatgcattttcggcgaggttactccggatccagatattgatattctgacttccggcgcggcgcgttttaaagcctttaagcccgacgttattatcgccctcggcggcggctcgtcgctggacgctgcgaaaggaattaaagtcacattggaagagtattttggagatcatcaaatcgatctcattgctattcccacaaccagcggatccggctctgaagtgacgtcctacgcgatcatctctgatccgcaaaatggccgcaaatatccgttgatctccgggcaactggtgccggaaatcgccattctcgatcctaacctagtgttaaccgcgccgcgtcatgtcgcggtagataccggcatggacgtgctgacccatgccattgaagcctttgtctctactggctcaaatgactttagcgatgcgctggcggaaaaagccatcgcgttgacctggcgctatctgccgcaggtgtttaacgacgaaaaagacattgcggcgcgcacccacatgcacaatgcctcctgtatggcaggcatggcatttaactccgccgggctggggttggttcacggcatggcacacgccatcggcgggatgctgcatattcctcatggcaaaattaacgccatgctgctgccgattgtcatcgacttcaacagcaaacgggccagcactgaaacccgcgatcgctatcaccgttgcgcgcaaatcataggcattgaccatgcggtaccggagcaggccatcgcgctgatgactcaggagatccgccagatcaatcgccatttctgcatccccgtcactctcagcgaactgggcatcgaccgtgcaaaaatcatcgagttgcgcagcgcactggtgaattcgacgctggccgacggttgtaccgcgtcgaacccgcggcaggtgacgacgcatgatgtcgaagggttgatcgacctgattaccggctag

SEQ ID NO: 234 - protein, 372 aa, Escherichia coli CFT073
MARYYFSCPKIYFGEEAITSLCQFNNKRVGIVTDDFMMSSGKTRYLISHMPEASVCIFGEVTPDPDIDILTSGAARFKAFKPDVIIALGGGSSLDAAKGIKVTLEEYFGDHQIDLIAIPTTSGSGSEVTSYAIISDPQNGRKYPLISGQLVPEIAILDPNLVLTAPRHVAVDTGMDVLTHAIEAFVSTGSNDFSDALAEKAIALTWRYLPQVFNDEKDIAARTHMHNASCMAGMAFNSAGLGLVHGMAHAIGGMLHIPHGKINAMLLPIVIDFNSKRASTETRDRYHRCAQIIGIDHAVPEQAIALMTQEIRQINRHFCIPVTLSELGIDRAKIIELRSALVNSTLADGCTASNPRQVTTHDVEGLIDLITG

SEQ ID NO: 235 - DNA, 1245 bp, Rhodopseudomonas palustris BisB18
atgatcttgaccatcaactgcggcagttccagcctcaaatatcagctctatacgtcggatctgagcggtgtggtgggcaaggggatcgtcagtcggatcggcgaggcgtgtccctatatcgagcatcgcgccggcggacgtaagatccggcaagacgtcgaggccgccgaccaccgcatggcgctgcgggtggcgatggaaagcctgctgcacccggaatggggcgcgatcaaagacgtcagcgcaatcgaagcggtcggccatcgcgccgtacatggcggcgatatcttcgttgagtcggttctggtcaccgacgacgtgattcggcagctcgagcaatgcacgccgttggcaccgctgcacaacccgctcaatctgcacggcatccacgaggccaggcggctgctgccgggaattccgcaagtggtcgtgttcgacacctcgtttcatcagggaatgccggcccaggcctatgtctacgcgctgccgtatcgctactacgccgaacacaaaattcggcgctacggctttcacggcacctcgtgccgcttcgtgagcggccgcgccgccgaggtcttggaacgcccgctgcaagagcttcgcatggtgatctgccatcttggcaatggcgtcaccatcgacgccgtggccggcggtcgctcggtggataccagcatggggttcggaacattctccgggaccatgatgggcacgcgttcgggtgacttcgatccgggcctgatcttctacttgaaccgaacgctcaatatgagcttgggcgacatcgaggcgacttgctacaaggagagcggcctgctcggggtgtcgggtgtcagcaacgacatgcgggaggtggtggaacacgcgatcgccggcaatcaccgctgcagcctcgccatcgacatgttcgtctacatgatcaagaaatacatcggcggctatgccgcggcgatgggtgggctggacgccttggtgttcaccgccgggatcggcgagaacagtccctacatccgagcccggatctgcggcggtttgggcttcctcggcattgaggtcgacgacctggccaatgacgcggtggacggagcttgcgccatcatcagtccgagaacggcgtcggcggcaaccatggtcgttcccaccgacgaggaaaagatgatcgcactcgacaccgtgcatctgacggccggttgcggcgatcacagccgacgttcggcgcagcgggtcgaagccgcggccgggtag

SEQ ID NO: 236 - protein, 414 aa, Rhodopseudomonas palustris BisB18
MILTINCGSSSLKYQLYTSDLSGVVGKGIVSRIGEACPYIEHRAGGRKIRQDVEAADHRMALRVAMESLLHPEWGAIKDVSAIEAVGHRAVHGGDIFVESVLVTDDVIRQLEQCTPLAPLHNPLNLHGIHEARRLLPGIPQVVVFDTSFHQGMPAQAYVYALPYRYYAEHKIRRYGFHGTSCRFVSGRAAEVLERPLQELRMVICHLGNGVTIDAVAGGRSVDTSMGFGTFSGTMMGTRSGDFDPGLIFYLNRTLNMSLGDIEATCYKESGLLGVSGVSNDMREVVEHAIAGNHRCSLAIDMFVYMIKKYIGGYAAAMGGLDALVFTAGIGENSPYIRARICGGLGFLGIEVDDLANDAVDGACAIISPRTASAATMVVPTDEEKMIALDTVHLTAGCGDHSRRSAQRVEAAAG

SEQ ID NO: 237 - DNA, 1080 bp, Rhodopseudomonas palustris BisB18
atgtacaacctcgttatcgttgaagacgaagacctggagcgcgaggcgcttcgcaagatcctgacggagaacttcgattgcattcgcatcgtcggcgaggcgcgaaccggcgcggaggccgtggcgctgatcgattcctgtgacgtcgatctcatgctggtggacatcaacatcccgatcatcaccggcctggatgtcatccggcatctgcgcgaaggccacgtcgacaccaaggtggtcgtcaccaccgcctacgactatttcgagatgacgcgcgaggcgattcatctgaaggtcgacgagtacctgttgaagccggtgcggacccaggcgctggtctccaccctcgaaacctgcatccagcagctcggtgcggatcgcaagtgccgggtcatggtggcgcggctcggcgaattggccgatcaaaacgcctatcaagacggcgttgccctggtgcgtcgacacgtcgaatggatctgcacgcagcgcgattacccgtgccgcgacgtagcgcagaattcggcgaccgcgctgctggcgctcattcgggcgaaaggtctgcgggtctcggcggcgttggcgcggcaggtcacagaactgcggaccatgagcctcgacgaccgcggcctgcagtccgtgcttggtgtatttctcggcctcgcagatcttctgttcgacgttcgcgaggaacagctcgacgaggcgggcagcaccgtccaaaaggccatcaactacatcgaacgcaatctgagcaagcgggtgaccttggaggacgccgccgactacgccaagatcagcgcctgctatttgagcaggatgttcaaaaagacgctggacgtcaatttcgtgacctatctgacgacgcggaggatggagctcgccaaggagctgctggctggcaccgagcggtccatcaccaacatcgcaaaagagttctcctacaacgacctcaactatttctgcaaatcgttcaagaaggaaatcggggtgtcgccctccgaatatcgccgccaggcgcgggaaggccaaggcggagccccaggcgtcaggatggcgaccatggcggagccgcggccgtag

SEQ ID NO: 238 - protein, 359 aa, Rhodopseudomonas palustris BisB18
MYNLVIVEDEDLEREALRKILTENFDCIRIVGEARTGAEAVALIDSCDVDLMLVDINIPIITGLDVIRHLREGHVDTKVVVTTAYDYFEMTREAIHLKVDEYLLKPVRTQALVSTLETCIQQLGADRKCRVMVARLGELADQNAYQDGVALVRRHVEWICTQRDYPCRDVAQNSATALLALIRAKGLRVSAALARQVTELRTMSLDDRGLQSVLGVFLGLADLLFDVREEQLDEAGSTVQKAINYIERNLSKRVTLEDAADYAKISACYLSRMFKKTLDVNFVTYLTTRRMELAKELLAGTERSITNIAKEFSYNDLNYFCKSFKKEIGVSPSEYRRQAREGQGGAPGVRMATMAEPRP

SEQ ID NO: 239 - DNA, 1245 bp, Rhodopseudomonas palustris BisB18
atggatgcggaactgctgcttgaagacttgatcagcgtggatgcgctgcagaaggtgcaggacaattttagcgctgccgtcggcatcgcgatgatcatggtggacgcagctggcgcgcccgtgaccaagccgagcggattttccgccttctgccaggcggtgcggacctccgccgacaagcgcgaccagtgctttcattgtgacgacgagggcggccggatcgcgatggcgaagggcgagccgagcatctaccgctgtcatgccggtctggtcgatttcgccgcgccgatcgtggtgcgcggccaatatctgggagccatcctttccgggcaggtgcgtcttcgcgacgaatccgcgattcccgtggactacatccatccgcccgacgactggtggcggcaggatgaccggctgcgcgcgctgcgcgagaagaccaccgaagtggcgtatcagaagctgcgcgccgcggcattcacctcgtttcaccttgccacctatctggtggaagaaagctatgccaaggccgtcagcgaggaactcggcgccgagaacctacggctgatggcggaatcgaagcggcgtatggaattggagaagctgcttcgcgaagcggagctgcaggcgctgtcctaccaggtcaatccgcatttcctcttcaacgtgctgaacaccatcggccgtttggcgctgaaggagaacgccaagcagaccgagaccatgctgtacgcattcgccgacatgatgcgctacgttctgaagaagagccgctcgcagatcgtctcgttccacagcgagttggagcacgtgcagaactacttgaacattcaaaaggtgcgcatgggggacaggctgtccttcaccctgaacgtgcatcaaaaatacggcgagatccgctgtccgttcatggtcgtgcatccgatcgtggagaactgcattcactacgcgatcgagccgaaagagaaagacggctggatcgagatcacggcgcgcgacgacggcaaggacatgatcctggagatcaccgacaacggtgacggcatcgccccggacatgatcccggtggcgatctccggggtggccgatcaccacggtcgcaccagcatcgggctgcacaatatcgacagccggctccggcatttcttcggagacgactacaagctcaaggtcgaaagccgccgctccaggggcgggggcacttgggtgcagatgcgctttccgctgaaatttgacggtttccacgcctga

SEQ ID NO: 240 - protein, 414 aa, Rhodopseudomonas palustris BisB18
MDAELLLEDLISVDALQKVQDNFSAAVGIAMIMVDAAGAPVTKPSGFSAFCQAVRTSADKRDQCFHCDDEGGRIAMAKGEPSIYRCHAGLVDFAAPIVVRGQYLGAILSGQVRLRDESAIPVDYIHPPDDWWRQDDRLRALREKTTEVAYQKLRAAAFTSFHLATYLVEESYAKAVSEELGAENLRLMAESKRRMELEKLLREAELQALSYQVNPHFLFNVLNTIGRLALKENAKQTETMLYAFADMMRYVLKKSRSQIVSFHSELEHVQNYLNIQKVRMGDRLSFTLNVHQKYGEIRCPFMVVHPIVENCIHYAIEPKEKDGWIEITARDDGKDMILEITDNGDGIAPDMIPVAISGVADHHGRTSIGLHNIDSRLRHFFGDDYKLKVESRRSRGGGTWVQMRFPLKFDGFHA

SEQ ID NO: 241 - DNA, 1152 bp, Rhodopseudomonas palustris BisB18
atgcgagaacattgcgtaacgtcggaatcggtgaccgaaggccaccccgacaaggtctgcgaccagatctccgacggcattctcgatgcctgcgtggcgcaagatccggcgtcgcgggtggcggtggagactctcgtctccggcaacatcgccgttatcgccggcgaaatcaccaccacggcgcagatcgacgccgagcgcaccgcgcgcgcggtcatcaaggcgatcggctacgacgatccggcgctcggcttcgacagcgacagctgcttcatcctgaccaacttgcggacgcagtcgcccgatatcaatctcggcgtgtcccgcggcgacgagctcggcgccggcgaccagggcgttttctatggctatgcctgcgacgagacggcgaacctgatgccgatcccgattgcgctggcgcacacgctgtcgctgcggctgacgatgatgcgtcgcgacggaacgctgccgtggctgcggcccgacggcaaggtccaggtcacgatgcgctatggccgcgacgggcgcccctgcggcttggacagcgtggtggtctcggcgcagcacgacgaggccgtcgaccgggacacgttggtccgcggtctcgtcgagggcgttatctacccagaattgcacgactggctgcagcccggcacccgcgtgctgatcaacccgaccggccggttcgtcgtgggtggtccggccggcgataccggagtgaccgggcgcaagctgatggtcgacacctatggcggatgcgcccagcacggcggcggggcgttttccggaaaggatgccaccaaggtcgatcgcaccgcggcctatatggcccgctacgccgccaagaacgtcgtcgccgccgggctggctggccgctgccagctcgcgctggcttacgccatcggccagatcgaccccgaaatgatttccgtcgaaaccttcggcaccgaaaccgtcgatggcgatcgcatctgcgcggcggtgcgcgaggtgttcccttggaccgtgtccgggatgatcgcagccctcgagctgcgtcagccgagatttcggaaaaccgcggcctacggccatttcggccgggaagatcaaggcttccaatgggaaaaaaccgatcgatcgggcgagttgttggcgctttgcacgcgttga

SEQ ID NO: 242 - protein, 383 aa, Rhodopseudomonas palustris BisB18
MREHCVTSESVTEGHPDKVCDQISDGILDACVAQDPASRVAVETLVSGNIAVIAGEITTTAQIDAERTARAVIKAIGYDDPALGFDSDSCFILTNLRTQSPDINLGVSRGDELGAGDQGVFYGYACDETANLMPIPIALAHTLSLRLTMMRRDGTLPWLRPDGKVQVTMRYGRDGRPCGLDSVVVSAQHDEAVDRDTLVRGLVEGVIYPELHDWLQPGTRVLINPTGRFVVGGPAGDTGVTGRKLMVDTYGGCAQHGGGAFSGKDATKVDRTAAYMARYAAKNVVAAGLAGRCQLALAYAIGQIDPEMISVETFGTETVDGDRICAAVREVFPWTVSGMIAALELRQPRFRKTAAYGHFGREDQGFQWEKTDRSGELLALCTR

SEQ ID NO: 243 - DNA, 921 bp, Rhodopseudomonas palustris BisB18
atgagcgagatcaagtacgagcaggaagggatcgtcttcgacattcagcgctattcgattcacgacggtcccggaatccggaccatcgtgtttctgaagggctgtccgctggcctgccgctggtgcagcaatccggaatcgcagaaggccgagccgtcgctgttctttcagaaggcgaactgcgtcaaatgcggcaagtgcaaggaagtctgcccgaccggcgcgatctcgcccgaaaacccggccttcatcgatcggtcgaaatgcatctcctgcggcacctgcgccaacgtctgcgcttacggcgcgctgaccatgaaggggcgcagcatgacggtgtggcaggtgatgcaggaattgcagaaggacgccaccaactatcgcaggtcgggcggcgggatcaccttgtcgggcggcgagccattggtgcagagcgactttgcgctggaattgttgaaagcctgcaaggacaaggggtggtcgaccgcgatggagaccaccggcaacgtgccgcaggaggtggtggagcgggtgatgccctatgtcgaccacgctctagtggatctgaaatcgatcgatcccgcggtgcatgagaagaacaccgcaaggccgaaccggctgatcctggagaacgcgatccggatctcgaaattgtcgggcaacaccgcggtgcgggtgccggtgatccctggcgtcaacgacaatcccgccgcgatcgccgccatcgcgcaattcgccaagctgatgcacggcgtcgagaccgttcatctgctgccgtaccaccggttcggcgagaacaaatacgcgctgcttggtcgcgactacccgatgggcgatacgccggcgttggccggtgcgaaggccgaagcgctcaagctcgtcgtcgaggggcagggcttgcgttgtctgatcggcggatga

SEQ ID NO: 244 - protein, 306 aa, Rhodopseudomonas palustris BisB18
MSEIKYEQEGIVFDIQRYSIHDGPGIRTIVFLKGCPLACRWCSNPESQKAEPSLFFQKANCVKCGKCKEVCPTGAISPENPAFIDRSKCISCGTCANVCAYGALTMKGRSMTVWQVMQELQKDATNYRRSGGGITLSGGEPLVQSDFALELLKACKDKGWSTAMETTGNVPQEVVERVMPYVDHALVDLKSIDPAVHEKNTARPNRLILENAIRISKLSGNTAVRVPVIPGVNDNPAAIAAIAQFAKLMHGVETVHLLPYHRFGENKYALLGRDYPMGDTPALAGAKAEALKLVVEGQGLRCLIGG

SEQ ID NO: 245 - DNA, 300 bp, Rhodopseudomonas palustris BisB18
atgaccacccggatcatcaatgcgccgcttcccgaagtcgtcgacatgctcgagcgccggatgcggccggacgcccggcatcatctgagcgagatccggttcgactcggtcggcctgctgcagaccagcgtggccgacctgttctactacgcggatctcgccggcaaggcgtccggcgtgttcaccgccgagctgttcggaagctgcccgcagaacgtctccacgctggcgctgttcggcgaaaccgccgccgttcgtatcgcgatcgaggccatcgaggccgacggcgcgagtttctaa

SEQ ID NO: 246 - protein, 99 aa, Rhodopseudomonas palustris BisB18
MTTRIINAPLPEVVDMLERRMRPDARHHLSEIRFDSVGLLQTSVADLFYYADLAGKASGVFTAELFGSCPQNVSTLALFGETAAVRIAIEAIEADGASF

SEQ ID NO: 247 - DNA, 1395 bp, Rhodopseudomonas palustris BisB18
atggtggccaaggcgatccgcgaccacgccggaactgcgcagccgtccggtaacgccgcgacgtcgtcggcggcggtcagcgatggcgtgttcgagaccatggatgccgcggtcgaggccgctgctctggcgcagcagcaatacctgctttgctcgatgtccgaccgcgcgcgcttcgtgcagggaatccgcgacgtcatcttgaatcaggatacgctcgaaaagatgtcccgcatggcggtcgaagaaaccggcatgggcaattacgagcataagctgatcaagaaccggctagccggcgaaaagaccccgggcatcgaagatctcaccaccgacgctttcagcggcgacaacggtctgacgctggtggaatactcgccgttcggggtgatcggcgcgatcacgccgaccaccaatccgacggaaaccatcgtctgcaattcgatcggaatgctggcggccggcaacagcgtggtgttcagcccgcatccgcgcgcccggcaggtgtcgctgctgctggtccgcctgatcaaccagaagctggcagcgctcggcgcgccggaaaacctggtggtgaccgtggagaagccctcgatcgagaacaccaacgccatgatggcgcatcccaaggtgcggatgctggttgccaccggcggccccgccatcgtcaaggcggtgctgtcgaccggcaagaaggcgatcggcgccggcgccggcaatccgcccgtcgtggtcgacgaaaccgccaacatcgaaaaagccgcctgcgacatcgtcaatggctgcagcttcgacaacaacctgccctgcgtcgccgagaaggagatcatcgcagtcgcccagatcgccgattacctgatcttcaacttgaagaagaacggcgcctacgagatcaaggatccggcggttctgcagcaactgcaggacctggtgctgaccgccaagggcgggccacagaccaaatgcgtcggcaagagtgcggtgtggctgctgtcgcagatcggcatcagcgtcgacgccagcatcaagatcatcctgatggaagtgccgcgggaacatcccttcgtgcaggaagaactgatgatgccgatcctgccgctggtccgggtcgaaaccgtggatgatgcgatcgacctcgccatcgaggtggagcacgacaatcgccacaccgcgatcatgcattccaccgatgtgcgcaagctcaccaagatggccaagctgatccagaccacgatcttcgtgaagaacggcccgtcttatgcggggctcggcgccggcggcgagggatattccaccttcaccatcgcgggtcccacgggcgagggcctgacctcggcgaagtcgttcgcgcgccgccgcaaatgcgtgatggtggaagcgctcaatatccgttga

SEQ ID NO: 248 - protein, 464 aa, Rhodopseudomonas palustris BisB18
MVAKAIRDHAGTAQPSGNAATSSAAVSDGVFETMDAAVEAAALAQQQYLLCSMSDRARFVQGIRDVILNQDTLEKMSRMAVEETGMGNYEHKLIKNRLAGEKTPGIEDLTTDAFSGDNGLTLVEYSPFGVIGAITPTTNPTETIVCNSIGMLAAGNSVVFSPHPRARQVSLLLVRLINQKLAALGAPENLVVTVEKPSIENTNAMMAHPKVRMLVATGGPAIVKAVLSTGKKAIGAGAGNPPVVVDETANIEKAACDIVNGCSFDNNLPCVAEKEIIAVAQIADYLIFNLKKNGAYEIKDPAVLQQLQDLVLTAKGGPQTKCVGKSAVWLLSQIGISVDASIKIILMEVPREHPFVQEELMMPILPLVRVETVDDAIDLAIEVEHDNRHTAIMHSTDVRKLTKMAKLIQTTIFVKNGPSYAGLGAGGEGYSTFTIAGPTGEGLTSAKSFARRRKCVMVEALNIR

SEQ ID NO: 249 - DNA, 504 bp, Rhodopseudomonas palustris BisB18
gtgagtgcacccacagccgagatgcgaagtatcaccgaggcaatccacgcggtgctggccaatctcaatggtcccgccttcgcgttggacgatgcctgtcggctggcgcgcgcggccgagcacaaggccgccgagatcggcgtgccgatggtgatctcgatcgccgatgccacaggcggcatgttgctgctgcatcggatggatggcgcgctgccggcgagcttcgatatcgcgatcaacaaggcctacaccgccgccatcttcaggatggcaactcatgatctcggggccttggcgcagcccggccgctcgctctacggcgtgcaaaccaccaatcagggtcgggtggtgattttcggcggcggatatccggtgttgcgccgaacaaccgtgatcggtgccatcggggtcagtggtggcaccgtcgaacaagacatgcagatcgcaacctttgcgctgcaaacattcgaggcagaagcaaagctctgcgctgaaggagaatag

SEQ ID NO: 250 - protein, 167 aa, Rhodopseudomonas palustris BisB18
MSAPTAEMRSITEAIHAVLANLNGPAFALDDACRLARAAEHKAAEIGVPMVISIADATGGMLLLHRMDGALPASFDIAINKAYTAAIFRMATHDLGALAQPGRSLYGVQTTNQGRVVIFGGGYPVLRRTTVIGAIGVSGGTVEQDMQIATFALQTFEAEAKLCAEGE

SEQ ID NO: 251 - DNA, 267 bp, Rhodopseudomonas palustris BisB18
atgtatctcggcaaagtcatcggcaccgtggtgtccacgagcaagagcgaatcattgctgggcaccaagctcctgatcgtgacccggctctccgaaacgctggctgtgatcgggccggtcgccatcgccgtcgacaccgtgggcgccggcaacggcgaaatcgtcatcgtgacctgcggcagtgccgcgcggcgaaccgccggcaaggaacagtcggtgatcgacgcggcgatcgtcggcatcgtcgatacggtcgaagtcagttag

SEQ ID NO: 252 - protein, 88 aa, Rhodopseudomonas palustris BisB18
MYLGKVIGTVVSTSKSESLLGTKLLIVTRLSETLAVIGPVAIAVDTVGAGNGEIVIVTCGSAARRTAGKEQSVIDAAIVGIVDTVEVS

SEQ ID NO: 253 - DNA, 804 bp, Rhodopseudomonas palustris BisB18
atgaccagggagcagctcgaggccagcatcgcggaggcgattatcggatgtctcgccgatcgcgtggtcgcggccatgcaggcgcgtcagaagcgcgccgtggtgttgatgaccgggaccgatctggggctcgaccatattccgcaggcgctgggctgcctgcgcgagaacggctggacgctgcggttcgcgttgtcgctgcaggcgcgccggcacttcggcgccgggcagttgctggcgctcggcatcgacgtggtggccgacacagcaaccgacctcgacgtcctgctcgacggttgcggctcgctgctggtgccggcgctgacgatgacgacggccgccaaggtggcttgcggcatccgcgacagtctggcgtcgcgattgatggcgcgggcgctggagcgcgggctgccgatcatcgccgccttcgacggctgttgcccggacaatccggaacggcaggccagaggcttcctggtcgccgatgcctataaggcgcggctccgcgccaacctgcaggcgttgagggactacggggtcaggctggtccccgcgcgcaaactggcagtcgccgcgcagcgcgcgatcactccggcgaccgcgattggcacgcaagcgacgggcggcgtggcggcgatgccggcggcgggtgtcgcggtcggtgccggcgacaggcgaatcttcagccgcaacgacgccgtgcagtgtcagccaggcgagctgcggctaggccgtgaagtcctggtcacgccgctcgccgccgacgaactgcgcatccgaaatgtacgtctgattcaaacatag

SEQ ID NO: 254 - protein, 267 aa, Rhodopseudomonas palustris BisB18
MTREQLEASIAEAIIGCLADRVVAAMQARQKRAVVLMTGTDLGLDHIPQALGCLRENGWTLRFALSLQARRHFGAGQLLALGIDVVADTATDLDVLLDGCGSLLVPALTMTTAAKVACGIRDSLASRLMARALERGLPIIAAFDGCCPDNPERQARGFLVADAYKARLRANLQALRDYGVRLVPARKLAVAAQRAITPATAIGTQATGGVAAMPAAGVAVGAGDRRIFSRNDAVQCQPGELRLGREVLVTPLAADELRIRNVRLIQT

SEQ ID NO: 255 - DNA, 852 bp, Rhodopseudomonas palustris BisB18
atgtacgacagcaatgcggacgcaacgctacgggacttctcgcgactgatccgggacgagctctgtctgccggcggcggatcgaaccggcgcgctgaaggccggcgtcgatcttggcaccgccaacatcgtgctgtcggtggtcgatgccagtaacacgccggtggcgggggcgagctatccctccaaggtggttcgcgacggcatcgtggtggactatgtcggtgccgtgaatgtggtgcggcagcttaaggcgaagctcgagcaacgcctgggctgcagcctgatcgaagccggcaccgcggtgccgcccggcattctccacggcaacatcaaggccatcgccaatgtggtggaggccgccggcttcgtggtggcggatgtcagcgacgagccgaccgccgccgcacgggtgctcggcgtgcgcgacggtgcggtggtggatgtcggcggcggcaccaccggcatcagcatctttcgcgatggcaaggtggtgttcaccgacgacgaagccaccggcggcacccacatgacgctggtgctcgccggcgcctatggggtgtcgttcgaggatgccgaactgatcaagatgtccccggcctcgactcgcgacgtattcgcggtggtgcagccggtggtcgagaagatggccagcatcgtcaagcgctgcctgcaaggccatgacgtcgagacgatctatgtggtcggcggcgcctgcagcttcgaacaattcgagcacgtcttcagccgcgagaccggctgcaaggtgatcaaaccggccgagccgctgctggtgacgccgctcggcatcgcgatgtacggcggctccgcaggctgcggggggcgatcatga

SEQ ID NO: 256 - protein, 283 aa, Rhodopseudomonas palustris BisB18
MYDSNADATLRDFSRLIRDELCLPAADRTGALKAGVDLGTANIVLSVVDASNTPVAGASYPSKVVRDGIVVDYVGAVNVVRQLKAKLEQRLGCSLIEAGTAVPPGILHGNIKAIANVVEAAGFVVADVSDEPTAAARVLGVRDGAVVDVGGGTTGISIFRDGKVVFTDDEATGGTHMTLVLAGAYGVSFEDAELIKMSPASTRDVFAVVQPVVEKMASIVKRCLQGHDVETIYVVGGACSFEQFEHVFSRETGCKVIKPAEPLLVTPLGIAMYGGSAGCGGRS

SEQ ID NO: 257 - DNA, 681 bp, Rhodopseudomonas palustris BisB18
atggacatgcagcaagaaacaatcgaacggatcattcggcaagtgctcgggcaagtcgggcctgcgggcggttcgatcgcgacgctctccggcgacgccggcgtggatccatttcaagtcgcggtcggtgtatccaaccggcacatccatctgtcgcgaaccgacatggacacgctgttcggtccgggcgccgaactgcaacgcaagaaggcgatgaagcagccggggcaattcgcggccgaggaaaccgtgacgctgaaggggccgaagggaagcctctccaaggtgcgggtgctcggaccattgcgccgcgaaacccaggtcgaggtttccgtcgccgatggcttcgcgctcggaatcaccccgccgttgcgccagtcgggccagctcgacgacacgccgggactgaccatcatcgggccgcagggcagcgtgaccaaggaccacggcgtgatcgtggcgcagcggcatatccacatgcacccgagcacggcggccaagctcggtctgcgcaacggcgacgaagtcgacgtcgaggccggcggcgagcgcggcggggtgatgcaccgggtgctgatccgcgtcgcggaagcctcggccgatgaaatgcatatcgacgtcgaagaggccaacgcgctgtgcctcaagaacgatgacgtggtccgtatctgcaaaaagtga

SEQ ID NO: 258 - protein, 226 aa, Rhodopseudomonas palustris BisB18
MDMQQETIERIIRQVLGQVGPAGGSIATLSGDAGVDPFQVAVGVSNRHIHLSRTDMDTLFGPGAELQRKKAMKQPGQFAAEETVTLKGPKGSLSKVRVLGPLRRETQVEVSVADGFALGITPPLRQSGQLDDTPGLTIIGPQGSVTKDHGVIVAQRHIHMHPSTAAKLGLRNGDEVDVEAGGERGGVMHRVLIRVAEASADEMHIDVEEANALCLKNDDVVRICKK

SEQ ID NO: 259 - DNA, 282 bp, Rhodopseudomonas palustris BisB18
atgatgagtggcgaagcactgggaatggtcgaaaccaagggtctgatcgggtccatcgaagccgcggacgcgatgaccaagtccgccaatgtgaccctgatcggttacgaaaagatcggatcgggcctcgtgaccacgctggtccgcggcgatgtcggcgcggtcaaggcggcggtcgatgccggcgccgcggcggccgagaaggtcggcaccgtgatctccaagcacatcattccgcggccgcatgcggatgtcgagaagatcctgccgcatctcggctag

SEQ ID NO: 260 - protein, 93 aa, Rhodopseudomonas palustris BisB18
MMSGEALGMVETKGLIGSIEAADAMTKSANVTLIGYEKIGSGLVTTLVRGDVGAVKAAVDAGAAAAEKVGTVISKHIIPRPHADVEKILPHLG

SEQ ID NO: 261 - DNA, 588 bp, Rhodopseudomonas palustris BisB18
atgacgcaacgaagtctcggattgatcgaaacgatcggtctggctgccgcgatcgaagccgccgatgccgcggtcaaatcagccaatgtgacgctggtggggtacgaactcgcgcgcggcgacggcatgaccgtggtcaaagtcgagggtgaaatcggcgccgtcaacgccgccatcgccgccgcggcggtcgcggcggccaagatcaaccgggtggtctccacccgggtgatcgcccgaccggcggtcggcatcgccgggatgatcgcgaatggcgatacggttggcgctgaagccgcgccggcctgcctgtcatccgctgccgcgccggtggtggcttcggcgccggcgccgatcgctccggctgcgtcggtcgatgaaaccgccggcatggccgcgcccgctgatccgacggctgcggcagcatcgccgagcgccgccgccgccgcgccgcggcaggccaccgacgctgcacagaatccaacaccatccgagcaatcggctgcaacccaattgccgcaggcaaaagccggcggtcgatcgagcaatggacacaacggcaaaccgaaacacaggcatggcgcctga

SEQ ID NO: 262 - protein, 195 aa, Rhodopseudomonas palustris BisB18
MTQRSLGLIETIGLAAAIEAADAAVKSANVTLVGYELARGDGMTVVKVEGEIGAVNAAIAAAAVAAAKINRVVSTRVIARPAVGIAGMIANGDTVGAEAAPACLSSAAAPVVASAPAPIAPAASVDETAGMAAPADPTAAAASPSAAAAAPRQATDAAQNPTPSEQSAATQLPQAKAGGRSSNGHNGKPKHRHGA

SEQ ID NO: 263 - DNA, 750 bp, Rhodopseudomonas palustris BisB18
atgggtgcggagccggcggctcgcccggacgctccgaagtcactcgctgcactgagtggctgcggcatgaccgaattcgtcggcaccgcgatcggccacaccatcgggttggtgatcgccaatgtcgacccgctgctgcacgagaagatgaagatcaacccgaagtaccggtcgatcggcatcatcggcgcacgcaccggagcagggccgcagatcttcgcggcggacgaagccgtgaaggccaccaacagcgaagtggtgctgatcgaattggcgcgcgataccgaaggcggcgcgggtcacggctgcttgatcctgttcggcgccgaggatgtttcggacgcccgtcgcgcggtcgaagtcaccctgagcgaagtgcagcgcaccatgggcgacgtctatggcacgccggcggggcatctggaattccagtacaccgcccgggcgagctacgcgttgcaaaaggcgttcggcgcgccgcttggccaggccttcggcatcacggtcggcgcgcccgcggcgatcggcgtcgtgctggcggataccgccgccaaggccgccacggtgcaggctgtcggctacgcctcgccgggcaacggcaccagcttcagcaacgaagtgatcttcatgttctccggcgattccggcgcggtgcggcagtcggtgatcgccgcgcgtgatgtcggcaagcggctgctggcgacgctcgatccggcggagatcaagtcgaccaccacgccgtacatctga

SEQ ID NO: 264 - protein, 249 aa, Rhodopseudomonas palustris BisB18
MGAEPAARPDAPKSLAALSGCGMTEFVGTAIGHTIGLVIANVDPLLHEKMKINPKYRSIGIIGARTGAGPQIFAADEAVKATNSEVVLIELARDTEGGAGHGCLILFGAEDVSDARRAVEVTLSEVQRTMGDVYGTPAGHLEFQYTARASYALQKAFGAPLGQAFGITVGAPAAIGVVLADTAAKAATVQAVGYASPGNGTSFSNEVIFMFSGDSGAVRQSVIAARDVGKRLLATLDPAEIKSTTTPYI

SEQ ID NO: 265 - DNA, 294 bp, Rhodopseudomonas palustris BisB18
atgcaacaggaagctctaggcatggtggaaaccaaaggtttggttgccgcgatcgaagccgccgacgccatggtgaagtcggccaacgtggccttgatcggctacgaaaagatcggatccggactggtgacggtcatggtccgcggcgatgtcggcgcggtgaaggccgcaaccgacgccggcgccgtggccgccgcgaaggtcggcgaggtggtgtcggtgcacgtcgtcccgcggccgcattcggaagtcgaaaagatcctgccgcatggcgcaaccgccgccgcagcctaa

SEQ ID NO: 266 - protein, 97 aa, Rhodopseudomonas palustris BisB18
MQQEALGMVETKGLVAAIEAADAMVKSANVALIGYEKIGSGLVTVMVRGDVGAVKAATDAGAVAAAKVGEVVSVHVVPRPHSEVEKILPHGATAAAA

SEQ ID NO: 267 - DNA, 1140 bp, Rhodopseudomonas palustris BisB18
atgaccgcaattcagcgcttcgttctcaagaccgagattgtttccgggccatcgattctcgatcggctggaggcattccgaggacagcgggccggcatcatcacggatgccttcatgctgaagtcgggtgcggtggaccggatccgggccaagctgccggagtgcgccatcgagatcttcggcgagatcaccgcggagcccacggtcgcgctggtcgcaaaggccgcgcggacgatggcagcctttggcccgagcgtcgtcgtggcactcggtggcgggtcggcgatcgacgcagccaaggcaattctcgcaactatgcgggagatggatccggctcgccacgtcatcctggtggcggtgccgacgaccagcggcaccggctcggaagtgacgtcgtattcggtgatctccgatccggcgcgcgggctgaagtttccgctgagttcgccgcagatgatcccggatatcgcactgctggattccgaactggtccgcaccgtgccggctaacgtgacggccgacaccggcatggacgtcatcacccattgcctggaagcttacgtcgccaccggagcgaccgatttcagcgacgccttcgccgaaaaggcgctcagtctcgctttcgtcaacctgccggccgcttttgccaacggcaacgacatcgcggcccgttctgcgatgcatagcgcatcttgcatggcgggcgtggcattcgaactcgccgggcttggcctcaatcacggcatggcgcatgcgctcggcggccggcttcacattccccacggcaagatcaacgcgatgctgctgccgctggtgatcgcatacaatgccggcgtgcagggcgactttgctccctgcctgcccgccgccacccgctacgccgcgatcgccagccgcgccggctgggaagccgcgaccccgcgggccggcgcgcagagcctgattcgcgcgctgtcccggctgaacgagcaattcggcattccacccacattgcgcgcgcttggtatcgatctcagtgagctgccgcgctgggggccggaactggccgaagctgcgctgatggatccttgcacggcggctaacccgcgcaagcccagcctcagcgacatcaaccatctggttcgcgcggtggccggatag

SEQ ID NO: 268 - protein, 379 aa, Rhodopseudomonas palustris BisB18
MTAIQRFVLKTEIVSGPSILDRLEAFRGQRAGIITDAFMLKSGAVDRIRAKLPECAIEIFGEITAEPTVALVAKAARTMAAFGPSVVVALGGGSAIDAAKAILATMREMDPARHVILVAVPTTSGTGSEVTSYSVISDPARGLKFPLSSPQMIPDIALLDSELVRTVPANVTADTGMDVITHCLEAYVATGATDFSDAFAEKALSLAFVNLPAAFANGNDIAARSAMHSASCMAGVAFELAGLGLNHGMAHALGGRLHIPHGKINAMLLPLVIAYNAGVQGDFAPCLPAATRYAAIASRAGWEAATPRAGAQSLIRALSRLNEQFGIPPTLRALGIDLSELPRWGPELAEAALMDPCTAANPRKPSLSDINHLVRAVAG

SEQ ID NO: 269 - DNA, 2544 bp, Rhodopseudomonas palustris BisB18
atgatcgaaaaaggtttctccaagccgaccgaaagggtcatgcggctgaagaacgtcatcctgaacgccaagccgttcgtggagtcggaacgcgccgtcctggtcaccgatgcctacaaggaaaccgaaggcctgccggccattctgcgccgcgccaaggccgcggagaagatcttcaacaacctgccggtgacgatccgcgcggacgagttgatcgtcggcgcgattactaagcgtccgcgctccaccgagatctgcccggaattctcgttcgactgggtcgagaaggaattcgagaccatggccacccgcgtggccgatccgttccagatccccaaggagaccgcggccgaacttcatgaggccttcaagtattggcccggcaagaccaccagcgatcttgcgtcctcctacatgtcgcaggaagccaaggactgcatcgccgccggcgtattcacggtcggcaactacttctatggcggtgtcggccacgtctgcgtcgattacggcaaggtgttgaagattggtttccgcggcatcatcactgaagtcgtgctggcgatggagaagcttgaccggatggatccgggctatatcaagaagcagcagttctacaacgcggtgatcatttcctacaccgccgccatcaatttcgcgcaccgctatgcggtcaaggccgaggagctggcgcagaccgaatccaacgccacgcgcaaggccgaactgctgcagatcgccaagaattgcgcccgtgttccggaatatggcgcgagcaatttctacgaagcctgccagtcgttctggttcctgcaggccctgctgcagatcgaatccagcggccactcgatctcgcccggccgcttcgatcagtacatgtatccattcctcgccgccgataagagcatctcgcgggagttcgcgcaggaactgatcgactgcatctggatcaagctcaacgacgtcaacaaaacccgcgacggcggttcggctcaggcctttgccggctacgcggtgttccagaatctctgcgtcggcggccagaccgaagaaggtctcgacgccaccaacgacgtctccttcatgtgcatggaagcgaccgcgcatgtggcgctgccggcgccctcgttctcgatccgcgtctggcagggcacgcccgacgatttcctttaccgggcctgcgaagtggtccgcctcgggcttggcgttcccgccatgtacaacgacgaagtcattgtcccttcgctgcaaaaccgcggcgtctcgctccgcgacgcccgcgactacggcatcgtcggctgtgtcgagccgcaggcgatccacaagaccgagggctggcatgacgccgcgttcttcaacgtcgccaaggttctcgaaatcaccctgaataacggccgggtcggcgacaagcaggtcgggccggcgtccggagaacttctcagcttccgctgcatcgacgatgtcttcgccgcattccaaaagcagatcgaatacttcgtgcgctacctcgtcgaagccgataactgcgtcgatctcgcgcatggggaacgctgcccgttgccgttcgtttcggcgctggtcgaagactgcatcggccgcggcaagtcgctgcaggaaggcggcgcgctttacaacttcaccggcccgcaggccttcggcgtcgccgacaccggcgactcggtctacgccatccagaagaacgtgttcgaggacaagaagatcaccctcggcgaattgaaagcggcgctcgacgccaatttcggtcggccggtgggcgagagcgcgcatgccgacgcgggaaccaactacaccgaggaacaggtgttcgctgcggtgaagaaggtgctgaacagcagcggctcgaccgatgtctcggcgctcaagggcaaggtctacagcgcactggctggggccaatggcgcgaagagcggcggtgcctcgtcgagctatgacgcgctgcatcgcttgctcgaagccaccccggcgttcggcaacgatatccacgaagtcgacatggtcgcccgcagatgcgcccagatctattgcctcgaagtcgagaaatacaccaacccgcgcggcggccaattccaggcggggatctatccggtgtcggcgaacgtgctgttcggcaaggacgtcgccgcgctgccggacggccggttcgccaaggcacccttggctgacggcgtttctcctcgtcagggcaaggacgtcaatggtccgacggcggcggccaactcggtcgccaagctcgaccatttcatcgcctcgaacggcacgctctacaatcagaagttcttgcctgcggcgctcgccggcgacagcggattgcagaacttcgcctcgctggtccgcagttacttcgaccacaagggcatgcacgtgcagttcaacgtggtggatcgacagacgctgctggatgcgcaacgcgagcccgagaagcacaacgacctcgtcgttcgtgtcgccggctacagcgcgcagttcgtggtgctcgccaaggaagtgcaggacgacatcatcagccgcaccgaacagaccttgtag

SEQ ID NO: 270 - protein, 847 aa, Rhodopseudomonas palustris BisB18
MIEKGFSKPTERVMRLKNVILNAKPFVESERAVLVTDAYKETEGLPAILRRAKAAEKIFNNLPVTIRADELIVGAITKRPRSTEICPEFSFDWVEKEFETMATRVADPFQIPKETAAELHEAFKYWPGKTTSDLASSYMSQEAKDCIAAGVFTVGNYFYGGVGHVCVDYGKVLKIGFRGIITEVVLAMEKLDRMDPGYIKKQQFYNAVIISYTAAINFAHRYAVKAEELAQTESNATRKAELLQIAKNCARVPEYGASNFYEACQSFWFLQALLQIESSGHSISPGRFDQYMYPFLAADKSISREFAQELIDCIWIKLNDVNKTRDGGSAQAFAGYAVFQNLCVGGQTEEGLDATNDVSFMCMEATAHVALPAPSFSIRVWQGTPDDFLYRACEVVRLGLGVPAMYNDEVIVPSLQNRGVSLRDARDYGIVGCVEPQAIHKTEGWHDAAFFNVAKVLEITLNNGRVGDKQVGPASGELLSFRCIDDVFAAFQKQIEYFVRYLVEADNCVDLAHGERCPLPFVSALVEDCIGRGKSLQEGGALYNFTGPQAFGVADTGDSVYAIQKNVFEDKKITLGELKAALDANFGRPVGESAHADAGTNYTEEQVFAAVKKVLNSSGSTDVSALKGKVYSALAGANGAKSGGASSSYDALHRLLEATPAFGNDIHEVDMVARRCAQIYCLEVEKYTNPRGGQFQAGIYPVSANVLFGKDVAALPDGRFAKAPLADGVSPRQGKDVNGPTAAANSVAKLDHFIASNGTLYNQKFLPAALAGDSGLQNFASLVRSYFDHKGMHVQFNVVDRQTLLDAQREPEKHNDLVVRVAGYSAQFVVLAKEVQDDIISRTEQTL

SEQ ID NO: 271 - DNA, 2553 bp, Clostridium novyi NT
atgaatgatattttggctagaaattattcgtctatacctaaagaaagaataaatatattaattgaggatctttattcggttactccagaaattgaagcagatagagcagttttaattactgaatcatttaaagaaacagaatcaatgcctatggttattagaagggctaaggctttagaaaagatactaagcgaaatgcctatagtaattcgtgatagtgaattaatagtgggaaatcttactaaaaaaccaagagcagctcaaatatttcctgagttttcaaataaatggttactggacgaatttgatagacttgcaaatagaaaaggtgacgtatttttaatttcagaagatacaaaagataaattgagagaagtattcaaatactgggatggaaagacaacaaatgaattcgcaactgaaattatgtttgatgaaacaaaagaagcaatggatgaaggggtatttacagtaggtaattactatttcaatggtgttggacatatatgtgtagactatgctaaagttttatcaaaaggtttcaatggaataattcaagaagtacaagaggaaaggaaaaaagcagataagggagatcctaattacataaagaaggatcaatttttaacatctgtagaaataacatgtaaggccgctgttaagtttgcaaaacgttttggagaagaagcaaaaactcttgcaagtagaacaatggattcaaagagaagagaagaattattacaaatagctcataattgtgaatgggtaccagcaaatccagcaagaaacttctatgaagcattacaagctttctggtttgttcaagctataattcaaatagagtcaaatggacattcaatttctcctatgcgttttgatcaatatatgtatccttattttaagaatgatatagaaagtggaagaattgatatgtcaagagctcaagaacttcttgattgtctgtgggtaaaatttaatgatgtaaataaagttcgtgatgaaggttccacaaaagcatttggcggatatcctatgtttcaaaacttaatagttggtggacaaaccatatatggtgaagatgcaacaaatgaattatcatttatgtgccttgaagctacagcacatacaaaattacctcaaccatcaatatcaataaggggttggaacaaaactccagatgaattgttatttaaagctgctgaagttagtcgtctaggattaggtatgccagcttattataatgatgaagttataattccatctttacttaatagaggactttccatggaagatgctagggattatggaattataggatgtgttgaacctcaaaagggtggaaaaacagaaggatggcatgatgctgcattttttaatatggcaaaagttcttgaaatcactatgaataatggtatgtcaaatggaaaacaacttggacctaaaactggagatgttacattatttaattcttttgaagaatttatgaatgcatatagagaacaaatgaagtattttgtaaaacttttagctaatgcagataactgtgttgatgtagcacacggaatgagagcacctttaccattcttatcttcaatggtttatgattgtataggaaagggaaaatcacttcaagaaggtggtgcgcattataactttacaggtccacaaggtgttggagttgcaaataccgccgattctcttgaagttattaaaaagttagtttttgaagaaagattagtttcaatgggagatttaaaagaagctcttgatactaactttggagaatgtaattcaagtaacagcttaaatttaaatagtataaataatataaatccagaaaatttaaatagagaaacaattatggctgtaattgaaaaacttttatttaaagaaagtaatatatcagtaaataatttaaatagtaatattaacttaggaaactatcaaggaaaagaaagtcttcgtcaaatgcttataaatagagcgcctaaatatggtaatgatattgatgaggttgataatttagctcgtgaagcagcattaatttattgtaaagaagttgaaaaatatacaaatccacgtaatggtaaattccaacctggattgtatccagtttctgcaaatgttcctatgggtgctcaaacaggggctactccagatggaagaaaagctggagaaccactagcagatggtgtatcaccagtttcaggcagagatcaaaatgggcctactgctgctgtcaactcagttgcaaaattagatcatgctatagcatctaatggaacattgtttaatcaaaaattccatccatctgcacttcaaggtgaagcagggcttagaaacttatctgctttagttagaacattctttgaaaacaaaggaatgcatgtacaatttaatgtagttagtagagaaatgcttttagatgctcaaaaaaatccagagaaatataagagcctagtagttcgtgtagcaggatatagtgctcattttacttcacttgataagtcaatacaagatgatattataaagagaacagaacatcaactataa

SEQ ID NO: 272 - protein, 850 aa, Clostridium novyi NT
MNDILARNYSSIPKERINILIEDLYSVTPEIEADRAVLITESFKETESMPMVIRRAKALEKILSEMPIVIRDSELIVGNLTKKPRAAQIFPEFSNKWLLDEFDRLANRKGDVFLISEDTKDKLREVFKYWDGKTTNEFATEIMFDETKEAMDEGVFTVGNYYFNGVGHICVDYAKVLSKGFNGIIQEVQEERKKADKGDPNYIKKDQFLTSVEITCKAAVKFAKRFGEEAKTLASRTMDSKRREELLQIAHNCEWVPANPARNFYEALQAFWFVQAIIQIESNGHSISPMRFDQYMYPYFKNDIESGRIDMSRAQELLDCLWVKFNDVNKVRDEGSTKAFGGYPMFQNLIVGGQTIYGEDATNELSFMCLEATAHTKLPQPSISIRGWNKTPDELLFKAAEVSRLGLGMPAYYNDEVIIPSLLNRGLSMEDARDYGIIGCVEPQKGGKTEGWHDAAFFNMAKVLEITMNNGMSNGKQLGPKTGDVTLFNSFEEFMNAYREQMKYFVKLLANADNCVDVAHGMRAPLPFLSSMVYDCIGKGKSLQEGGAHYNFTGPQGVGVANTADSLEVIKKLVFEERLVSMGDLKEALDTNFGECNSSNSLNLNSINNINPENLNRETIMAVIEKLLFKESNISVNNLNSNINLGNYQGKESLRQMLINRAPKYGNDIDEVDNLAREAALIYCKEVEKYTNPRNGKFQPGLYPVSANVPMGAQTGATPDGRKAGEPLADGVSPVSGRDQNGPTAAVNSVAKLDHAIASNGTLFNQKFHPSALQGEAGLRNLSALVRTFFENKGMHVQFNVVSREMLLDAQKNPEKYKSLVVRVAGYSAHFTSLDKSIQDDIIKRTEHQL

SEQ ID NO: 273 - DNA, 900 bp, Clostridium novyi NT
atggaaggtattgtttttgatatacaaaggttctctgttcatgatggtcctgggatacgctcattagtgtttttaaagggatgtcctctttcatgcttatggtgtagtaatccagaatcccaaaagcctaatcctcaagtaatgttcatttctcgcaattgtatacaatgtggcaattgtgctagagcctgtaaagttggagcaatagatgttataaatagaaatggaatagataaaaacaaatgtataaactgtggaaaatgcgtagagacttgttatgctaatgcattaaatatggctggtacatcaaaaaaagtagaagagattatagaggttttaagaaaagataatagttattatagaagatctggtggaggtataaccttatctggtggagaaccgctatatcaaggtgattttgcaatagaacttttaaaagcttgtaaagataaaggatgtcatacagctgttgaaacaacggcatttgttaatagagaagtgctaaaaagagctttaaagtatttagatttagttatggttgatgtaaagagcatggattgcataaaacataaaaaatatactggacaagataatgaaattatattaggtaatataaaatttatttcagaatttggagtaccaattgtaatcagagttcctgttataccaggagttaatgatgatgaagaaaatataaggaatactgcaaaatttgcaatgagtttaaatggggtaaaagaagttaacttattaccgtaccatagattaggtgaaaataaatatgattacttaggatatgaatataaaatgaaagatttagaagttccaggggatgacaatataaataaactaaagtctattgtagaacaatatggattaaattgcaaaataggtggttaa

SEQ ID NO: 274 - protein, 299 aa, Clostridium novyi NT
MEGIVFDIQRFSVHDGPGIRSLVFLKGCPLSCLWCSNPESQKPNPQVMFISRNCIQCGNCARACKVGAIDVINRNGIDKNKCINCGKCVETCYANALNMAGTSKKVEEIIEVLRKDNSYYRRSGGGITLSGGEPLYQGDFAIELLKACKDKGCHTAVETTAFVNREVLKRALKYLDLVMVDVKSMDCIKHKKYTGQDNEIILGNIKFISEFGVPIVIRVPVIPGVNDDEENIRNTAKFAMSLNGVKEVNLLPYHRLGENKYDYLGYEYKMKDLEVPGDDNINKLKSIVEQYGLNCKIGG

SEQ ID NO: 275 - DNA, 738 bp, Clostridium novyi NT
atgtataagctaatgattgcagaagatgaaccgttagaaagaagggctcttagaattatactagaaaaaaatttttttaatatagaagttatagatgatgctaaaaatggtatagaagctattaaaaacgcccgattaaataaacctgatattatacttatggatattagaatgcctgaaaaaactggtttagatgcacaaaaacaaataatatcatttttgccaaatgtaaaaacaattatcttaactgcttatggtgattttaattatgcacaaacagctataaaatataatgttatagactatcttttaaaacccgttcgtccatcagatttaaaaaactctataaataaggcacttaatcttataaataaagaaacttcatcaaaaattagtaagaaaactttaagtggaactgaagaaaaccctattaaagctgcaataaaatatataaatgacaattacactcaacagcttacattaaatttagtagcaaatttagtacacttaaatcctcaatatttcagtagatattttaaatctaaaacaggttatacttttactcaatatataacaaaactaagaattgataaagcaaaaaaacttcttgcaacatcagataaatctataactcaaatatcactagaggttggttatatagatccagcctactttagtaaagttttttataaatcagaaaaaaaatctccttgtaaatacaaagcttcttttatataa

SEQ ID NO: 276 - protein, 245 aa, Clostridium novyi NT
MYKLMIAEDEPLERRALRIILEKNFFNIEVIDDAKNGIEAIKNARLNKPDIILMDIRMPEKTGLDAQKQIISFLPNVKTIILTAYGDFNYAQTAIKYNVIDYLLKPVRPSDLKNSINKALNLINKETSSKISKKTLSGTEENPIKAAIKYINDNYTQQLTLNLVANLVHLNPQYFSRYFKSKTGYTFTQYITKLRIDKAKKLLATSDKSITQISLEVGYIDPAYFSKVFYKSEKKSPCKYKASFI

SEQ ID NO: 277 - DNA, 1212 bp, Clostridium novyi NT
atgaatttgttaaaaaatgtacaatttgcagatatcatagacattaatactcttagagatattcaaaataaattagcaaaacttattaatttccctacaattacagtagatataaatggtatacctgtatgtgaagaaaataactttactccgttttgtagattaattcgttcatctccagagggtagaaaaaagtgtattctttgtgattcacaagctgggtttattgcaatacgcgagaaaaaaccacgacattacaactgtcatacaggacttattgattgcgcagctccgattattgtaaacgatttatatttaggatctgttttaggtggacaagttcttgtacgaggtgaaaaagatataaattctttagatcttgaaaaaatatcaaaggaatgtaatattcctttgaaaaaattaaaagaaattgctaaaaccatacctatagttgattctcaatatgttgaagattgcgtaagtttctataggcttttagctaattatatagctcatttaggaatggtgcgtctaacccaagaacaattattaaaagaaagtaaggaaaaaataaaacttgaacaacaagccaaaaaagcccaaattaaaactataaaagcgcaagttaatcctcattttctttttaacacacttaacacaatagcaagaatggctcttattgaagatgctcccaaaacagaagaattaatatataatttatctgatcttttaagatataatcttagaaatttagaagtacttcctaaaataaaagatgaaatggaaaacatagaaagatatctttttattcaatcattacgctatagtgacagaatattctataaaattaatatagataaggaagtattggactttaggattccaaccatgacattacaaccaatagttgaaaattgtttagttcatggtctagagacaaaagtagatggcggaactatagaaattaccggaaaactaactggacataatgatttaataataaaagtttctgataacggaaaaggaatagactctgctgttcttagaatattaaacaatttagataacttagataaggatatttttggaatcggaattcaaaatactcataacagaataagacattactttggagaaaattatggacttaaaatagaaagccaattaaatataggaactacagtttatataaaaataccacaaataaaataa

SEQ ID NO: 278 - protein, 403 aa, Clostridium novyi NT
MNLLKNVQFADIIDINTLRDIQNKLAKLINFPTITVDINGIPVCEENNFTPFCRLIRSSPEGRKKCILCDSQAGFIAIREKKPRHYNCHTGLIDCAAPIIVNDLYLGSVLGGQVLVRGEKDINSLDLEKISKECNIPLKKLKEIAKTIPIVDSQYVEDCVSFYRLLANYIAHLGMVRLTQEQLLKESKEKIKLEQQAKKAQIKTIKAQVNPHFLFNTLNTIARMALIEDAPKTEELIYNLSDLLRYNLRNLEVLPKIKDEMENIERYLFIQSLRYSDRIFYKINIDKEVLDFRIPTMTLQPIVENCLVHGLETKVDGGTIEITGKLTGHNDLIIKVSDNGKGIDSAVLRILNNLDNLDKDIFGIGIQNTHNRIRHYFGENYGLKIESQLNIGTTVYIKIPQIK

SEQ ID NO: 279 - DNA, 282 bp, Clostridium novyi NT
atgggacaagaagcattaggaatgatagaaacaaaaggattagtaggcgcaatagaagcagcggattctatggtaaaggcagcaaatgttgcgttgattggatatgaaaagataggatcaggacttgtaactgtaatggtaagaggagatgttggggcagtcaaagcagctactgatgcaggttgtgcagctgcaaaaagggttggagaagttgtttcagttcatgtaattccaagaccacatacagatgtagaaaaaatattaccttgtttaaacaaataa

SEQ ID NO: 280 - protein, 93 aa, Clostridium novyi NT
MGQEALGMIETKGLVGAIEAADSMVKAANVALIGYEKIGSGLVTVMVRGDVGAVKAATDAGCAAAKRVGEVVSVHVIPRPHTDVEKILPCLNK

SEQ ID NO: 281 - DNA, 858 bp, Clostridium novyi NT
atgaacgaagatttaataaataaggttatagaagaattaaagggaagaatgaatttagataatagtagtaaaaatacaacaaataaaaatgaaaatatagttaaagaagaggaagtcaaaaaagttttaaaaaatgatgaagagagggaaagtgctatgtttaatgatgtaccaacaataacagagtatgtaggaagtgctattggggatactgtaggcttagtaattgcaaatgtagatggatatttacatgaaaaaatgggattagatccaaaatatcgttcaatcggattgttaagcgcaagaactggtgcaggtccacatattatggcagcagatgaagctgtaaaagctacaaacactgaaattgtatctatagaacttgcaagagatacaaaaggtggagcaggacatggttctttaataatatttgctgctgaagatgtttcagacgcaagaagagctgttgaaatttcattaaaagctttggaaagaacatttggagatgtatacggatgtgatgcaggacacgtggaacttcattatacagctagagcaagttatgctttagaaaaaggatttggagctcctgttggaaaatcatttggtatcatagttggagcaccagctgctgtaggagttgtaatggctgatactgctttaaaaactgcaaatgtagaaatgatttcttatgcaagcccaagccaaggaactgctaactcaaacgaagttataataacaataacaggtgattctggtgctgtaagacaatcagttatggcagcaagagaagttggacttggaatattaagatctatgggtcaaaatccagtatcaacaactgaaccttatatttaa

SEQ ID NO: 282 - protein, 285 aa, Clostridium novyi NT
MNEDLINKVIEELKGRMNLDNSSKNTTNKNENIVKEEEVKKVLKNDEERESAMFNDVPTITEYVGSAIGDTVGLVIANVDGYLHEKMGLDPKYRSIGLLSARTGAGPHIMAADEAVKATNTEIVSIELARDTKGGAGHGSLIIFAAEDVSDARRAVEISLKALERTFGDVYGCDAGHVELHYTARASYALEKGFGAPVGKSFGIIVGAPAAVGVVMADTALKTANVEMISYASPSQGTANSNEVIITITGDSGAVRQSVMAAREVGLGILRSMGQNPVSTTEPYI

SEQ ID NO: 283 - DNA, 576 bp, Clostridium novyi NT
atgcatagagaagcccttggatttatagaaactttgggcatgattccagcagtggaggctgctgatagttgtgttaagtctgctaatgtaaagtttttggggtatgaacgctcaactgggggacttgttaccataaaaattgaaggagacgttggggctgtaaaagcagcaatcgatgctggaaaagctagtgcacaaaaacttggagttgtaatttccactttagttataccaagaccggcaaatgatattgattatatggtaagtggtgacaaagaaataaaaaaagaagtaaaagataataaggatgaaaataaagaagaaattaaggctgaagctaataaagaagaagtaaaacaggttgaaacaaaggaattacaaaaaatacaagagacagaagatatagaagaaaagattaaagaagatagagacaatagtaaagaagaattacaaacaagtatcgatgataatgaaattaaaaaaaaaagaaatgtttgtaacttatgttatgaccctaaatgcacaaggaaaaagggacaaccaaaaacattgtgtatacactacaaaagtaagtaa

SEQ ID NO: 284 - protein, 191 aa, Clostridium novyi NT
MHREALGFIETLGMIPAVEAADSCVKSANVKFLGYERSTGGLVTIKIEGDVGAVKAAIDAGKASAQKLGVVISTLVIPRPANDIDYMVSGDKEIKKEVKDNKDENKEEIKAEANKEEVKQVETKELQKIQETEDIEEKIKEDRDNSKEELQTSIDDNEIKKKRNVCNLCYDPKCTRKKGQPKTLCIHYKSK

SEQ ID NO: 285 - DNA, 651 bp, Clostridium novyi NT
atgaatgtggaagagcaattagttcaagatatagctaaagaaatttttcaaaaatctcaagttaaagatagaagtttaagtattccggtaggtgtatctaataggcatattcatttaaataaagaagatttgagaattttgtttggtgaaaattatgaacttaaagtaaaaagtaaaataagtcaagttggtcaatttgcggctgaagaaacagtttgtatagctggtcccaaaggatgttttacaaaagttagagtactagggcccattagagaatatagtcaaattgaattatctaaaacggattcttatacattaggaataaaagctccagttagagtttctggagatatagaaggttcagctaatttatgtgtaattggacctaaaggaatgaaagtgtttaatgaaaaagtaatttgtgcaaaaagacatgttcatatgttacctaaagatgctgataagtatggagttaaagatggtgacttagtagatgttgaaactataggagatagaagtgtggtatttaaagatgtattagttagagtcacaaataagtctgctttagaaatgcatatagataccgatgaagcaaatgcatctggagtaaagagtaaggatatggtgagaattattaggataaataggtga

SEQ ID NO: 286 - protein, 216 aa, Clostridium novyi NT [sequence omitted]

SEQ ID NO: 287 - DNA, 843 bp, Clostridium novyi NT
gtgataaatatgcttaaagtagccaataatattatcaaaaatatggaatcaaaactaataaataataattcggatatagaaatagataaaaatattttaaaggaaaagttaaaagttggagtagatttaggtactagaaatattgttttaacagttttagataaaaacaataatccagtaataggagctatggaaactgcaaatgtagtaaaagatggaatagtagttgactatattaaagctgtagatatagtgtgtaaattaaaaagtatggtagaagaaaagttgaaaattaatcttaactatgcagctaccgcaatacctccaggaattattgagggaaatgtgagagtaattcaaaatgtagtgcaaggtgcaggatttgaaattataaatgttattgatgaacctgaggcagcttcaaaagtattaaaaataaaaaatggtgcagttgtagatataggtggaggcactacaggtatttcaattcttcaaaatggaaaagttgttttttcagatgacgaggctactggaggtacacatttaactcttgtaacttcagggaatttcaatttgtcttttgaagaagctgagaaatataaattagatcctaaaaatcatgataaagtattttctttagtaagacctgtcatagaaaaaatggctaacataactttaaattgcatatctagatttgatgtaaattctatttacctagttggtggtacttgttgtatagatggtattgaaaatgtttttgaaaaatatacaaaggtaaaaacatttaagccatacaatccattattagtaacacctattggcatttcgatgagtatccaataa

SEQ ID NO: 288 - protein, 280 aa, Clostridium novyi NT
MINMLKVANNIIKNMESKLINNNSDIEIDKNILKEKLKVGVDLGTRNIVLTVLDKNNNPVIGAMETANVVKDGIVVDYIKAVDIVCKLKSMVEEKLKINLNYAATAIPPGIIEGNVRVIQNVVQGAGFEIINVIDEPEAASKVLKIKNGAVVDIGGGTTGISILQNGKVVFSDDEATGGTHLTLVTSGNFNLSFEEAEKYKLDPKNHDKVFSLVRPVIEKMANITLNCISRFDVNSIYLVGGTCCIDGIENVFEKYTKVKTFKPYNPLLVTPIGISMSIQ

SEQ ID NO: 289 - DNA, 801 bp, Clostridium novyi NT
atgaatatagaagaaatgatacaagctattgtaactcaaatgatgcccttatttaataaaaaggtagtactttttgtaagtgggggaaatgtaaatgttgaaaaaatcataaagatattatcaaaatttaatttagcaaattatagcatagttttttcagagaatgctaaagaaatattagaaaataaatttgttgaaaaattaaaagcaaatattataaatgatacagaaaaggtaatggaagatttaatagattgtgatattgtacttattccagttatgacaagaaatactttaagtaaagttgcattaggtatatcagataatattttaactacaggtatttcaagagcaataatgttaaagaaagagattattgctcttagagatagtttttgtagtgaaaatcctataaatatagcaaaaggattttctaaaaataaaaactataatttaatgatttcaaactatgagaaaacattagaatcttttggagtaaaatttgtggattcagaggaattcaaagattcgttacaatataaatttaataactttttatcagaggataaacaagatttaaaaataaatagtgaactttcaaatatgtcaataaaagaaattaataaaacccaagaacaagacttaaaaggcataaaaatattcaaagaatctattttaacggtgaaagatataagtaagtttttagtggggaaagaattaaacttaactaaggacagtattataacacctcttgctaaggattttatttataataacaaaatcaaaataaattattgttaa

SEQ ID NO: 290 - protein, 266 aa, Clostridium novyi NT
MNIEEMIQAIVTQMMPLFNKKVVLFVSGGNVNVEKIIKILSKFNLANYSIVFSENAKEILENKFVEKLKANIINDTEKVMEDLIDCDIVLIPVMTRNTLSKVALGISDNILTTGISRAIMLKKEIIALRDSFCSENPINIAKGFSKNKNYNLMISNYEKTLESFGVKFVDSEEFKDSLQYKFNNFLSEDKQDLKINSELSNMSIKEINKTQEQDLKGIKIFKESILTVKDISKFLVGKELNLTKDSIITPLAKDFIYNNKIKINYC

SEQ ID NO: 291 - DNA, 1464 bp, Clostridium novyi NT
atggaaatgttagataatgatttaaagtcaatacaagaagccagaatcttagtagcaaaagcaaaagaagcacaagcaatatatagagaattttcagaagaagaaattaataaagttatagaaaatattgtaagagtcattgataaagaagcaattagacttgcaaaacttgctaaccaagaaactggttttggaaaatgggaagataaagtaataaaaaataaatttgcaagcaatatagtttataaccatataaaagatatgaaaactattggaattttaaatgatgataaagaaaataaaataatggaagttggtgtgccagtaggagttattgcaggattggtaccatctacaaatccaacagctacaactatatataattcattaatagctttaaaatctggaaatgcaataatattttcaccacatccaactgctaaaaactgtattcttgaaactattaaagttataaaaagagcagtagttgaagcgggagcaccagaaggtatagtagatggaatgagtgttctttcaatggagggaacttcagaattaatgaaacataaagatgtatcattaatccttgcaactggtggagaagctatggttaaagcagcatatagttcgggaactccagctataggagtaggaccaggaaatggacctgccttcatagaaaaatcagcagatatagccaaagctgttaaaagaatcatagatagtaagacttttgataatggtgttatctgtgcatcggaacaatctatagtagtggaaagatgtacaagaaatcaagttatagaagaattaaagagacaaggtggatattttttaaatgctgaagaatcagaaaaacttggtgaatttattttaagatctaatggaacaatgaatcctcaaatagtaggaaaagatgcacaaactttggcaaactttgcgggatttactatacctgaaggaacaaaagtattaatttcggaacaaacaacagttggaaaaagcaatccatattcaagagaaaaattaactacaattttagctttttattgtgaagaagattgggaaagtgcttgtaatagatgtatagaattattaatgaatgaaggtaaaggacatacattgatacttcactccaataatgaagaaataataaaagaatttgcccttaaaaaaccagtttcaagattacttgtaaatactccaggagcgcttggaggtattggaggaactacaaatcttgtaccagccttaacattgggttgtggagctgtaggtggaagtgcaacttcagacaatgtaggacctatgaatttaataaatataagaagaattgcctacggtgtaaaagagttagaagatttaaaaggaaataaaagtgaaaatgttgcattatcagatgatatttcaaaagaatgtttagaagatataataaaaactataatgaaaagattaagttgctag

SEQ ID NO: 292 - protein, 487 aa, Clostridium novyi NT
MEMLDNDLKSIQEARILVAKAKEAQAIYREFSEEEINKVIENIVRVIDKEAIRLAKLANQETGFGKWEDKVIKNKFASNIVYNHIKDMKTIGILNDDKENKIMEVGVPVGVIAGLVPSTNPTATTIYNSLIALKSGNAIIFSPHPTAKNCILETIKVIKRAVVEAGAPEGIVDGMSVLSMEGTSELMKHKDVSLILATGGEAMVKAAYSSGTPAIGVGPGNGPAFIEKSADIAKAVKRIIDSKTFDNGVICASEQSIVVERCTRNQVIEELKRQGGYFLNAEESEKLGEFILRSNGTMNPQIVGKDAQTLANFAGFTIPEGTKVLISEQTTVGKSNPYSREKLTTILAFYCEEDWESACNRCIELLMNEGKGHTLILHSNNEEIIKEFALKKPVSRLLVNTPGALGGIGGTTNLVPALTLGCGAVGGSATSDNVGPMNLINIRRIAYGVKELEDLKGNKSENVALSDDISKECLEDIIKTIMKRLSC

SEQ ID NO: 293 - DNA, 279 bp, Clostridium novyi NT
atgtttattgcaaaagttgttggtaatgtagtgtcaactcaaaaaaatgaaaaattaataggaacaaagttattattagtaaaacctattgatgataatgggagcaccataaaaaatggtgaagttattgtagctgttgatactgcaggagcaggaaaaggtgaacttgtattagtagcgaaaggtagtgcagcaagacatgtttatgataataaaacaattccctcagatgctgcaatcgtaggaatagttgattctattgaatgcacaataaagtaa

SEQ ID NO: 294 - protein, 92 aa, Clostridium novyi NT
MFIAKVVGNVVSTQKNEKLIGTKLLLVKPIDDNGSTIKNGEVIVAVDTAGAGKGELVLVAKGSAARHVYDNKTIPSDAAIVGIVDSIECTIK

SEQ ID NO: 295 - DNA, 1143 bp, Clostridium novyi NT
gtgaatagatttagtgttaaaccggaagtgtattttaatgaaggttctatagaatatttaaaaacattaaaaatagataaagctttaatagttactgatgatatgatggttcaagtaggagttgttgataaggttgccgaggttttaaaatccaactgcaatgaatataaagttttttcaaaagttaagccagatccaccagttgaaattgtagctatgggagtaaaagttatgacttcttttaatccagatatagttattgctttagggggaggttcgtctattgatgctgctaaaagcataataatatttgcagctaatatgatgaataaaataggtacaagctataaaaaacctttatttattgcagttcctactactagtggcacaggttcagaggtaacaaacttttctgtaattacagttgaagataaaaagtttccaattattacaaacgaacttatacctgatgttgcaatagttgatgcagactttgtaaaaacagcacctcctaaaattactgcagatacagctatagatgcattaacacatgccattgaagcttatgtttcaacaaaagctagtgattatacagatgcgctttcggaaaaaagtgtaaagttaatttttaagtacttactttctgcatataaagatggaacaaatataaaagcgagacaaaaattacacaatgcatcttgtatggcgggtatggcttttacaaatgcttctctaggattaaatcatggtatggctcatgcgctaggtggagcttttcatataccacatggtagagctaatgcaatattacttccatatataattaaatttaatgcaaacattgaattgggagttgaaaatgaggttgcaagaagatatgctgaactctctagaattttaggactaccttcatcaaatgtgaaagaaggagtagaaaatttaatattttcaataaaagttttattaagagagacaagtactccgtcaacattaaaagaagttagaattaataaagaagagtttttggaaaagattgaagttatggctaataatgctatgaaagatagatgtacaattacaaatcctagaatagtatgtttgaaggatataattaaattatatttagaagcatatgaaggctaa

SEQ ID NO: 296 - protein, 380 aa, Clostridium novyi NT
MNRFSVKPEVYFNEGSIEYLKTLKIDKALIVTDDMMVQVGVVDKVAEVLKSNCNEYKVFSKVKPDPPVEIVAMGVKVMTSFNPDIVIALGGGSSIDAAKSIIIFAANMMNKIGTSYKKPLFIAVPTTSGTGSEVTNFSVITVEDKKFPIITNELIPDVAIVDADFVKTAPPKITADTAIDALTHAIEAYVSTKASDYTDALSEKSVKLIFKYLLSAYKDGTNIKARQKLHNASCMAGMAFTNASLGLNHGMAHALGGAFHIPHGRANAILLPYIIKFNANIELGVENEVARRYAELSRILGLPSSNVKEGVENLIFSIKVLLRETSTPSTLKEVRINKEEFLEKIEVMANNAMKDRCTITNPRIVCLKDIIKLYLEAYEG

SEQ ID NO: 297 - DNA, 276 bp, Shewanella putrefaciencs CN-32
gtggcttccgtctccgtctgttgtccctcctgttcagctactgacggggtggtgcgtaacggcaaaagtactgccgggcatcagcgctatctctgctctcactgccgtaaaacatggcagctcaccttcacttacaccgcatctcagcccggaacacaccagaaaatcattgatatggccatgaatggtgtcggttgccgcgccaccgcacgcattatgggcattggtctcaaccccattttccgccatttaaaaaactcaggccgcagtcagtaa

SEQ ID NO: 298 - protein, 91 aa, Shewanella putrefaciencs CN-32
MASVSVCCPSCSATDGVVRNGKSTAGHQRYLCSHCRKTWQLTFTYTASQPGTHQKIIDMAMNGVGCRATARIMGIGLNPIFRHLKNSGRSQ

SEQ ID NO: 299 - DNA, 342 bp, Shewanella putrefaciencs CN-32
ttgccgcgccaccgcacgcattatgggcattggtctcaaccccattttccgccatttaaaaaactcaggccgcagtcagtaacctcccggatacagccgggcagtgatgtcattgtctgtgcggagatggacgagcaatggggctacgtcggggcaaaatcacggcagcgctggctgttttacgcgtatgacaggatacgcagaacggtggtggcgcatgtctttggtgaacgcaccatggctacgctggaacgtcttcttggcctgctgtcggcctttgaggtggtggtatggatgacggacggatggccgctgtatgagtcacgcggctttgttgaataa

SEQ ID NO: 300 - protein, 113 aa, Shewanella putrefaciencs CN-32
MPRHRTHYGHWSQPHFPPFKKLRPQSVTSRIQPGSDVIVCAEMDEQWGYVGAKSRQRWLFYAYDRIRRTVVAHVFGERTMATLERLLGLLSAFEVVVWMTDGWPLYESRGFVE

SEQ ID NO: 301 - DNA, 924 bp, Shewanella putrefaciencs CN-32
gtggcaaagcaaaagttcaaaatcaccaactggcccacctacaataaagccctcatcaaccgtggctccataactttctggctggatgatgaagctattcaggcctggtatgagtcagcaacaccttcttcacgaggcagacctcagcgctattctgaccttgccatcacgactgtgctggtcattaaacgcgtattcaggctgaccctgcgcgctgcgcagggttttattgattccatttttacactgatgaatgttccgttgcgctgcccggattacaccagtgtcagcaggcgcgcaaagtcggttaatgtcagtttcaaaacgttcacccgaggtgaaatcgcgcatctggtgattgattccaccgggctgaaggtctttggtgaaggcgaatggaaagtcaaaaaacatggccaggaacgccgtcgtatatggcgaaagttgcatctggcagttgacagcaacacacatgaaatcatctgtgcagacctgtcgctgaacaatgtgacggactcagaagccttcccgggtcttatccggcagactcacagaaaaatcagggcagcagcggcagacggcgcttacgacacccggctctgtcacgatgaactgcggcgtaagaaaatcagcgcgcttatccctccccgaaaaggtgcaggttactggcccggtgaatatgcagaccgtaaccgtgcagtggctaatcagcgaatgaccgggagtaatgcgcggtggaaatggacaacagattacaaccgtcgctcgatagcggaaacggcgatgtaccgggtaaaacagctgttcgggggttcactgacgctgcgtgactacgatggtcaggttgcggaggctatggccctggtacgagcgctgaacaaaatgacgaaagcaggtatgcctgaaagcgtgcgtattgcctga

SEQ ID NO: 302 - protein, 307 aa, Shewanella putrefaciencs CN-32
MAKQKFKITNWPTYNKALINRGSITFWLDDEAIQAWYESATPSSRGRPQRYSDLAITTVLVIKRVFRLTLRAAQGFIDSIFTLMNVPLRCPDYTSVSRRAKSVNVSFKTFTRGEIAHLVIDSTGLKVFGEGEWKVKKHGQERRRIWRKLHLAVDSNTHEIICADLSLNNVTDSEAFPGLIRQTHRKIRAAAADGAYDTRLCHDELRRKKISALIPPRKGAGYWPGEYADRNRAVANQRMTGSNARWKWTTDYNRRSIAETAMYRVKQLFGGSLTLRDYDGQVAEAMALVRALNKMTKAGMPESVRIA

SEQ ID NO: 303 - DNA, 315 bp, Shewanella putrefaciencs CN-32
atgaaggccagcgtggtcaccgttgaaaagatgataaaagcatatcacagtgaacgttatgaaggtgttaccgcttttcttttatttggtaatccaacagatgttcttcatcttgttgagggcggagttaaaattccttcagtaaatattggaggaatgatttatgaagagggtcgtaaacaactcacgaaatccgtcagcgcaactcctgaagacatcgcgtcgtttaaaaaactgcatgagaaaggtgttcagcttgaactacggcaattaccctctgattccgcggttgatttttattctaaaattgaataa

SEQ ID NO: 304 - protein, 104 aa, Shewanella putrefaciencs CN-32
MKASVVTVEKMIKAYHSERYEGVTAFLLFGNPTDVLHLVEGGVKIPSVNIGGMIYEEGRKQLTKSVSATPEDIASFKKLHEKGVQLELRQLPSDSAVDFYSKIE

SEQ ID NO: 305 - DNA, 798 bp, Shewanella putrefaciencs CN-32
atggaaacatatcaaattattgcactggtcatggtagctgctttagcggggatagggagtgtgctggacgaagctcagacccaccgcccacttgtggtttgtacgctggtcgggatcgttctgggtgatattaaaaccggtattatcttaggcggtacacttgaaatgatggccctgggctggatgaacgtcgggcttgcaatggcgccagataccgccattgcttccgtcatttcaactatcctcgtcattacgacccatcagggcattgggcaaggtattgccatcgcagtcgccctggcagcagcaggtcaggtcttaactatttttatcagaacgatagcggtattctttgtccacaaggcagatacctatgccgagtccggcaatattcgaggtatcgagttcatgcatatcagtgcgctgtcattacaggcattacgcgttgcactccccacgctggccgtactgatgcttgatgttaccaccgttcagaacgttctcaacagtatcccggaagtcgtcacaaaaggtctccagatcggaggtggcattgttgtcgttgtgggttatgcaatggttgtcaatatgatgaatgtcagacatttgatgccattcctgtttgcgggttttctgattgcggctttcaccaatttcaatctggttggacttggagggatggggttagttgccgccattatttaccttcaggtaaatccaagattttctgcggccagtaaagcggtaagtagcccatcgaaagcaaccttgtctgatgaagacgatctcgattcctga

SEQ ID NO: 306 - protein, 265 aa, Shewanella putrefaciencs CN-32
METYQIIALVMVAALAGIGSVLDEAQTHRPLVVCTLVGIVLGDIKTGIILGGTLEMMALGWMNVGLAMAPDTAIASVISTILVITTHQGIGQGIAIAVALAAAGQVLTIFIRTIAVFFVHKADTYAESGNIRGIEFMHISALSLQALRVALPTLAVLMLDVTTVQNVLNSIPEVVTKGLQIGGGIVVVVGYAMVVNMMNVRHLMPFLFAGFLIAAFTNFNLVGLGGMGLVAAIIYLQVNPRFSAASKAVSSPSKATLSDEDDLDS

SEQ ID NO: 307 - DNA, 861 bp, Shewanella putrefaciencs CN-32
atgtcaatcgataataccaataaagacactactgttaccgaaaataaacgccttacctctggcgaccttagaagtatgtttttaagatcaaacgtccttctggcttcagcaaactttgaacgtgtacagaatctgggtatttgctatatcatgattcctgccataaaacggttgtatgcgccgggtccggaaagaatagaagctcttaaaagacatctggagtggtttaatactcagccctactgcgcctcccccatattgggtgttgcggcggcgatggaagaggaaaaagcaaacggtgcacagattgaagggaatagtatcagtggtgtaaaaatcggtttgatgggtcccttcgcaggtgttggagatcctattttttgggggactatcagacccgttcttgctgccctgggagcctctcttgcgttaaccggaaatatccttggcccaatcattttttttgtattgttcaacgcaatccgtttagcactgaaatactatggtttaaattacggataccagaaaggaagagaaattcttaaggatttgggtggggatcgccttcagaaactgacagaaggtgcatcaattctgggactgttcgttattggcgccctggtttgtaagtggacgacaattaatgtaccgattgttgtatcccgtgtcacacaggcagatggccatgtcacagtaacaacgctgcagaacatcttcgatcagttacttccgggaatgcttcctttggctcttacattgttagttgcaagattgctcaggaagaaactgagtcccctactattgattatgcttatttttgcattcggtattctgggttactgggctggaatattggcttaa

SEQ ID NO: 308 - protein, 286 aa, Shewanella putrefaciencs CN-32
MSIDNTNKDTTVTENKRLTSGDLRSMFLRSNVLLASANFERVQNLGICYIMIPAIKRLYAPGPERIEALKRHLEWFNTQPYCASPILGVAAAMEEEKANGAQIEGNSISGVKIGLMGPFAGVGDPIFWGTIRPVLAALGASLALTGNILGPIIFFVLFNAIRLALKYYGLNYGYQKGREILKDLGGDRLQKLTEGASILGLFVIGALVCKWTTINVPIVVSRVTQADGHVTVTTLQNIFDQLLPGMLPLALTLLVARLLRKKLSPLLLIMLIFAFGILGYWAGILA

SEQ ID NO: 309 - DNA, 303 bp, Shewanella putrefaciencs CN-32
atgcaacaagaagcgttaggtatggtcgagaccaaaggtctgactgcagcaatagaagctgctgatgcgatggtcaaatcagccaatgtcgtgctcattggttacgaaaaaattggttctggtctgataacagtgctcgtacgcggagatgtgggtgcagtcaaagccgccaccgatgccggttgtgcctctgctcgtcagatcggcgatgtcatcgctacccatgtcattccacgtccgcattctgatgttgaaaaactcctgccagcaggccttaaaccatctgaaggagttaaacaatga

SEQ ID NO: 310 - protein, 100 aa, Shewanella putrefaciencs CN-32
MQQEALGMVETKGLTAAIEAADAMVKSANVVLIGYEKIGSGLITVLVRGDVGAVKAATDAGCASARQIGDVIATHVIPRPHSDVEKLLPAGLKPSEGVKQ

SEQ ID NO: 311 - DNA, 816 bp, Shewanella putrefaciencs CN-32
atgagtagcgataacctcgtagaaaatattatcgccgaggtgctcggaaaagtcggggatttgaaaaccccgtccgccgcatcccagccggggatatctcagcaggagcccgctatcccaagaaaactttgcggtttaaccgagttcgtcgggacggcaacgggcgacagtatcggccttgtaattgccaacgttgacagcgccttgctggatgccatgcatctggagaagaaataccgttcaataggcatccttggtgcacgtactggtgcgggcccacagatcatggcggctgatgaagctgtcaaagccacaaatactgaagtcgttgcaattgaactggcccgcgacactaaaggcggcgcaggacacggttcactggtgctgttcggtggtcaggatgtttccgatgtgaaacgggctgtggaagtggcgctaggcgaacttgagcgtactttcggtgacatttacgccaacgcagcaggtcatgtggaactccagtacaccgcacgcgccagctacgctctggaaaaagcatttggcgccccccttggacgcgcctgtggcgtgattgtcggtgccccggcagcgattggtgtgctgatggcagacacggcgatcaaatctgccaatgtggatgtggtggcttacaactccccggcaaaaggcaccagctttactaacgaagttattctgattgtttccggtgactccggtgctgtgcgccaggcggtgcgttctgcacgtgatgtaggtctgactctgctggaaacaatgggtggcaaagcgccttcagccacaaccccctatatctga

SEQ ID NO: 312 - protein, 271 aa, Shewanella putrefaciencs CN-32
MSSDNLVENIIAEVLGKVGDLKTPSAASQPGISQQEPAIPRKLCGLTEFVGTATGDSIGLVIANVDSALLDAMHLEKKYRSIGILGARTGAGPQIMAADEAVKATNTEVVAIELARDTKGGAGHGSLVLFGGQDVSDVKRAVEVALGELERTFGDIYANAAGHVELQYTARASYALEKAFGAPLGRACGVIVGAPAAIGVLMADTAIKSANVDVVAYNSPAKGTSFTNEVILIVSGDSGAVRQAVRSARDVGLTLLETMGGKAPSATTPYI

SEQ ID NO: 313 - DNA, 2544 bp, Shewanella putrefaciencs CN-32
atgagccaattatcacaggcttttggtgaaccaactgaccgaattcgtgccttacgggaacaaatccttgatacgaccccctgcattgagacggatcgtgcccgcctgatcaccgagtcctataaggaaacggaatccctgcccatgatcatccgtcgcgccaaagcgcttgagaagatccttgcggaattgccggtcaccatccgggcaggtgaactaatcgttggtagtctgacagtcactcctcattccacacaaatttacccggagtactcaaatcgctggcttcaggatgaattcgatcgtctgaatctgcgtaaaggcgaccgttttaccataaccgatgaagcgaaacagcagctggatagcgtatttggctactgggaagggaaaacaacgaatgaactggctacatcctatatgttgcctgaaacgcttgattgcatggcagaaaatgtcttcactgtcggcaactattactttaatggcgtcggtcatatagccgtggactacgcgcgtgttctcgctcgtggatacaaaggcatcatccaggatgttgttgcagcaatggccagcgctgataaaaaagaccccgcttttctgaaaaaagaatcgttctacaaggcggtcattatttcttgtaacgcagcaatcaattttgctcatcgttacgcggttaaagctcgtactctcgcggaacaggcctcaccagtccgtaaaaaagagctgctgaaaattgctgaaatctgtgacaaagtacctgaaaatggtgcaagtaatttctatgaagcctgccagtcattctggtttgcccatgccattattcaacttgaatccaacgggcattctatctccccggcgcgtttcgatcagtacatgtacccttacctggaaaaggacagctccctgagcgaggaacaggcgcaggaattgctggattgtctgtggctcaagttcaacgacgttaacaaggttcgtgatgaaggctcgaccaaaggttttggtggctatccgatgttccagaacctgatcgttggcggtcaaaccagcggcggacaggacgccactaacagactgtcctttatggccatgacggctaccgcccatgttcgtctgcatgaaccttcactgtcagtacgtgtctggtcaaaatctccggacgatttgttactgaaagcctgtgaagtcagtcgtcttggtatggggatcccggcctattacaacgatgaagttgttatccctgcattgattaaccgcggcctgaccctggaagatgcgcgggaatacggcatcatcggctgcgtcgaacctcaacgtccgggaaaaacagaaggctggcacgacgccgcgttctataacatgagtaaggtactggaaataaccctgaacaacggacgctgcggggataaacaactcggccccaaaactggtgagctggattcattccagagtattgaagacatcattgaagcttatcgtaaacagaacgaatattttgtctatcatctggcaatggccgataacagtgttgaccttgctcatatggaacgggcccccctgccgttcctgtcctgtatggtggatgactgtatcagtcgcggtaaaagcgttcaggaaggcggtgcccattataacttcacgggtccgcaaggtgtcggcgttgccaatgtgggcgactcgctgatggctatcaaacgtctggtatttgaagaaggccaattatcgctgggtcatctgaaagaagcactggatgccaatttcggtgtatctggcgggatagagaaacctgacactatagccactgaaagtacgccgaaacaggatgcaacctatgaactagtccttgaggccgtgaagaaagtgctgggcgaaagcggcgcacttgcactcacctcactcaatagcaacccaccggagcctgtcaaaggggctaatgccgggctgacagcagtgcgtcagttactcattaatggcgcccccaagttcggtaatgacattgacgaagtggatatgctggcccgtaccggtgctgaaatttactgtcgcgaggtagaaaaatacaccaacccacgtggcggtttattccaggctggcttatatccggtatccgctaatgtggctctcggtgagagcgtcggggcaactccagatggacgtctggccggccagccgcttcccgatggggtgtcgcccagcaggggcatggatacaaaaggtccaaccgctgccgccaactcagtagccaagctggatcacttcctggcctcaaatggcacgctgtttaatcagaaattccatccggcagctctgaaaggcgatgagggattataccatctggcggccttactgcgtggttatttcgatcagaaaggcatgcatgttcagttcaatgtgatcgaccgtaatacactgctggcagcacaaaaagaaccagaaaaatatcgtgatctggttgtgcgtgtggcgggttacagtgcgcaatttgtctcactggataaaagcgtacaggacgatattatcctgcgaaccgaacatgtcttttaa

SEQ ID NO: 314 - protein, 847 aa, Shewanella putrefaciencs CN-32
MSQLSQAFGEPTDRIRALREQILDTTPCIETDRARLITESYKETESLPMIIRRAKALEKILAELPVTIRAGELIVGSLTVTPHSTQIYPEYSNRWLQDEFDRLNLRKGDRFTITDEAKQQLDSVFGYWEGKTTNELATSYMLPETLDCMAENVFTVGNYYFNGVGHIAVDYARVLARGYKGIIQDVVAAMASADKKDPAFLKKESFYKAVIISCNAAINFAHRYAVKARTLAEQASPVRKKELLKIAEICDKVPENGASNFYEACQSFWFAHAIIQLESNGHSISPARFDQYMYPYLEKDSSLSEEQAQELLDCLWLKFNDVNKVRDEGSTKGFGGYPMFQNLIVGGQTSGGQDATNRLSFMAMTATAHVRLHEPSLSVRVWSKSPDDLLLKACEVSRLGMGIPAYYNDEVVIPALINRGLTLEDAREYGIIGCVEPQRPGKTEGWHDAAFYNMSKVLEITLNNGRCGDKQLGPKTGELDSFQSIEDIIEAYRKQNEYFVYHLAMADNSVDLAHMERAPLPFLSCMVDDCISRGKSVQEGGAHYNFTGPQGVGVANVGDSLMAIKRLVFEEGQLSLGHLKEALDANFGVSGGIEKPDTIATESTPKQDATYELVLEAVKKVLGESGALALTSLNSNPPEPVKGANAGLTAVRQLLINGAPKFGNDIDEVDMLARTGAEIYCREVEKYTNPRGGLFQAGLYPVSANVALGESVGATPDGRLAGQPLPDGVSPSRGMDTKGPTAAANSVAKLDHFLASNGTLFNQKFHPAALKGDEGLYHLAALLRGYFDQKGMHVQFNVIDRNTLLAAQKEPEKYRDLVVRVAGYSAQFVSLDKSVQDDIILRTEHVF

SEQ ID NO: 315 - DNA, 921 bp, Shewanella putrefaciencs CN-32
atggcggaaattgattacgcgcagactggcaccgtatttaatatacaaaaattctccttacatgatggcccgggaatacgcaccattgtattcctgaaaggctgttatctggcatgtaaatggtgcagtaatccggaatcacagcacactgaaccggaaatattttactacgatcgcaattgtatccattgcggacgctgcgtatccgcctgccccgttggggctatcgatgcctcacgtcaagggcttattgaccggaatgcctgtattcattgtggagcttgcgctgaggtctgcccggctggcgcgatggttcagtcaggtaagagaatgtcggtggtggaggttatagacgaactgcgtaaagatgagacgcattatcgccgctccggtggaggtattacattgtccggtggcgaagcactggctcagcctgcatttgcagcagcattgctggccgcctgcaaagccagaggatggcatacagcgatggaaaccaccggaatagcctcccgggccgtgctggaaaaggttatcccattgcttgatatcgtattgctcgacatcaaaaccttttatagtgaacggcataaggaatttacgggacatccgaatgagacggttttacgtaatgcactgacaatttcagaactggcaaagaatgtcgccgttcggatcccggtaattcctggatttaatgatgatgaacaaagtatcgaagctattgccagatttgttacgcacatgaaaaatgtatcgcgattacatttattgccctatcacaactatggccagaataaatataacctgcttggcagaacgtacgacatgattgaaataaaaccaccggaagaaagtcgtatgcataaatataaagatattgtgacatcccttggaatcgactgcgtcatcggtgggtaa

SEQ ID NO: 316 - protein, 306 aa, Shewanella putrefaciencs CN-32
MAEIDYAQTGTVFNIQKFSLHDGPGIRTIVFLKGCYLACKWCSNPESQHTEPEIFYYDRNCIHCGRCVSACPVGAIDASRQGLIDRNACIHCGACAEVCPAGAMVQSGKRMSVVEVIDELRKDETHYRRSGGGITLSGGEALAQPAFAAALLAACKARGWHTAMETTGIASRAVLEKVIPLLDIVLLDIKTFYSERHKEFTGHPNETVLRNALTISELAKNVAVRIPVIPGFNDDEQSIEAIARFVTHMKNVSRLHLLPYHNYGQNKYNLLGRTYDMIEIKPPEESRMHKYKDIVTSLGIDCVIGG

SEQ ID NO: 317 - DNA, 828 bp, Shewanella putrefaciencs CN-32
atgaacacaaccttaccgacattaaagcaggagtgccttgccgaatttctgggcaccggactctttctgtttcttggtatcagttgcctcgcagcgatgaaactggctgccgccagtttcggtttgtgggagatctgtattgtctggggactgagtgtcgcactcggtgtttacctcactgcgggaatatccggagggcatcttaatccggcagtcactatcgcattgtggcttttcggcaatttcagtgcccataaggtcttaccttacatcctgtgccagattatgggcgcttttggcggcgccatggtggtctacctgctttaccacaatctgtttattgattatgagctggcacaccatattcaacgcggcagcatggacagccttgcacaggcgggtattttcacgacgtttccccatccggaaattaatctgcttcaggcttttgccagtgaaaccatcggaacgctgacgctgatgtgcctgatcatggcgctgaccgacgacggcaacggtgttcctcgcggtccgctggcgccgctactgattgggatttccgtggccctgattggggttgccatcggtgcactgacgggttttgcgctgaatccggcaagggatttaggtccccgtctgttcagctatctggctggctggggtagtaatgctttaacaggcggacgtgcattcccctacttcattataccactcgtcgcaccgatcttcggagcctgccttggcgccgcgctgtatcgcggtctgaccaggttaccacttctgccgggcaaggggggccagggaaaaagtctgtcgctgccggaataa

SEQ ID NO: 318 - protein, 275 aa, Shewanella putrefaciencs CN-32
MNTTLPTLKQECLAEFLGTGLFLFLGISCLAAMKLAAASFGLWEICIVWGLSVALGVYLTAGISGGHLNPAVTIALWLFGNFSAHKVLPYILCQIMGAFGGAMVVYLLYHNLFIDYELAHHIQRGSMDSLAQAGIFTTFPHPEINLLQAFASETIGTLTLMCLIMALTDDGNGVPRGPLAPLLIGISVALIGVAIGALTGFALNPARDLGPRLFSYLAGWGSNALTGGRAFPYFIIPLVAPIFGACLGAALYRGLTRLPLLPGKGGQGKSLSLPE

SEQ ID NO: 319 - DNA, 291 bp, Shewanella putrefaciencs CN-32
atgaacaatgcgcttggaatgatcgaaacctatggactgattggcgccatcgtaggtgcagatgccatggtcaaatcggcaaacgtccagttggtgggttacgaaaaaattggttccggcctggttaccgtcatggtacgaggtgatgtcggtgcggtaaaagcttcggtggaggcgggctccgcagctgcagccggtgtgggccaggtgaaatcaactcacgtcatcccacgtcctcataatgaggtggaaacgctgttgccggtttatcagaccgcaacagccgagtga

SEQ ID NO: 320 - protein, 96 aa, Shewanella putrefaciencs CN-32
MNNALGMIETYGLIGAIVGADAMVKSANVQLVGYEKIGSGLVTVMVRGDVGAVKASVEAGSAAAAGVGQVKSTHVIPRPHNEVETLLPVYQTATAE

SEQ ID NO: 321 - DNA, 867 bp, Shewanella putrefaciencs CN-32
gtgcaacattctcttggccttatcgaagtctcgggtatgtctctggcgataactgttgctgatgtgatggcgaaaaccgcccagatcagactgatcggcgtggaaagaaccatcgggtctggctggatgctggtgaaaattgcaggcgatgttgctgcagtgcgtacggctctatcggccggagaagaaacagccagagcacaccagggatttgttgcctgcaccacaatcgcccggccagcgaaaggaaccggtgaactggtttcaacaactaaaccgccccgagctgagcctgttcagaagataaccgttctcccggccgttgccctcacggcatccgccgcccataccacaaccggacctgaatccgttcaggaggatccggacgcagaaaaggcagtccccccgatcagggaggctgtcgagggaagcacaggcaatatcattcaggtcgatgctatcaatgatcctgtggaaacggccagggaaatcagtaaaccaaacgcttcagcaaagtctcctcctgctgaatatggtgaaaaacaatctgtggcgacggtcaaagcatttccggtcatgggagatatcgctactgacctcgatattccgacagcgtcagcgagatccgttgccgttgcgcagcaggttaaacccggaatatctctgcatcagtttcattatcaggaaaaacctgatgatgaaactgcagatgcgggtagccaacagacaggtgaaacaaaacaggctgtcgccatatcagcaaaattactggtgacatgcaaaatctgtggagatccttcatgtccgcgacataagggccagccacgcagtagatgtattcacaatcagaaatcggtattgaggtaa

SEQ ID NO: 322 - protein, 288 aa, Shewanella putrefaciencs CN-32
MQHSLGLIEVSGMSLAITVADVMAKTAQIRLIGVERTIGSGWMLVKIAGDVAAVRTALSAGEETARAHQGFVACTTIARPAKGTGELVSTTKPPRAEPVQKITVLPAVALTASAAHTTTGPESVQEDPDAEKAVPPIREAVEGSTGNIIQVDAINDPVETAREISKPNASAKSPPAEYGEKQSVATVKAFPVMGDIATDLDIPTASARSVAVAQQVKPGISLHQFHYQEKPDDETADAGSQQTGETKQAVAISAKLLVTCKICGDPSCPRHKGQPRSRCIHNQKSVLR

SEQ ID NO: 323 - DNA, 636 bp, Shewanella putrefaciencs CN-32
atggatcacgatctgatcacaaaactgaccggtcaggtaattgcgcagatgcggcaacgaacgattccgctgggtatatcaaaccggcatgttcatttgtcggcaaaagattaccagagtctgtttcccggacagactctgaaaattaaaaagccccttggtcagcccgggcaatttgcggcagagcagaccgtttccttaatcggtccaagaggtcagttgaaaaacgtacggatactggggccgttgcggggacaaacacaggtggaaatctcgtacaccgatgccaggcaaattggcctgacggcgccactccgcctgtcaggtgatctgaccggaagtgtctctgtcacactcaaaagcgaggccggagaaattaatctcaccgagggagtaatcatcgctcgcagacatattcacatgtcgccactggacgctgcgatatttggcgtaacacaaggagaaacggtgaaagtcgggattgagggcaccgatcgaaaactgatttttgatgatgtctgtatccgggttgctgaggatatgcgtcttgaaatgcatattgatactgatgaagcgaatgctgccggtattgatggaggccaggcagtggcaagacttctcctgacaaaacgctaa

SEQ ID NO: 324 - protein, 211 aa, Shewanella putrefaciencs CN-32
MDHDLITKLTGQVIAQMRQRTIPLGISNRHVHLSAKDYQSLFPGQTLKIKKPLGQPGQFAAEQTVSLIGPRGQLKNVRILGPLRGQTQVEISYTDARQIGLTAPLRLSGDLTGSVSVTLKSEAGEINLTEGVIIARRHIHMSPLDAAIFGVTQGETVKVGIEGTDRKLIFDDVCIRVAEDMRLEMHIDTDEANAAGIDGGQAVARLLLTKR

SEQ ID NO: 325 - DNA, 480 bp, Shewanella putrefaciencs CN-32
atgctggacatgatcgtctcaagggtcattacacttttacagggaagggaaagccggagtttacgggtgacccaggccgagctggcggcaggcttatcaaaaacggtttatttgcataatgcacaactgatattgcccttacctgatctggcttttattcagagtctggttgcctatgatcaccaccacccggcagtgtcgactgtcctggaagcatgggcatatggcgtaaggttacaccttcagatccaccagcaattactgaccgcactgccactgcgagagttacgccgccttccggtcacactcactgaccatatgagtacaccggtgaaactggcagctgcagctggcctcagctatgccagcgttattcactggcacgattgctgggttttactggaaaagcagacgctgattaccgccctcgcccgggaagtaatggaaagacagaacatcaaactaatatggcaggagtaa

SEQ ID NO: 326 - protein, 159 aa, Shewanella putrefaciencs CN-32
MLDMIVSRVITLLQGRESRSLRVTQAELAAGLSKTVYLHNAQLILPLPDLAFIQSLVAYDHHHPAVSTVLEAWAYGVRLHLQIHQQLLTALPLRELRRLPVTLTDHMSTPVKLAAAAGLSYASVIHWHDCWVLLEKQTLITALAREVMERQNIKLIWQE

SEQ ID NO: 327 - DNA, 279 bp, Shewanella putrefaciencs CN-32
atgcaactggcgaaagtcgtagggtcagtggtgtcgacgcaaaaatctgcgtccctgacaggtaaaaaattgatggtcgttactttagttaatctggacggctccacaccgcttttccaggaaaacacccaggaggttgctgtggattctatgggagcaggtgaaggtgagctggttctggtcagccgtggctcttcagccagaaagatctttccggaaccaaatcaggccattgatcttgccatcgtcggcatcgtcgataccatcgaccggttttag

SEQ ID NO: 328 - protein, 92 aa, Shewanella putrefaciencs CN-32
MQLAKVVGSVVSTQKSASLTGKKLMVVTLVNLDGSTPLFQENTQEVAVDSMGAGEGELVLVSRGSSARKIFPEPNQAIDLAIVGIVDTIDRF

SEQ ID NO: 329 - DNA, 510 bp, Shewanella putrefaciencs CN-32
atgccagaacaggatatagcatcccttatcagcgagcatcgcatattgctggaggaggccgtccgcgaagttatccgtcggtacccgcagtcactttcgccatcggaaaacttcagtaagcacattttcagttcagagcagttgaaaaacattatcgatactgttctggcagaggcgtggcagcaaagcgccatggtagttatcaccttgtgtgacgaaaaaggcgaatgtgttctgacttaccgcatgccaggtacatcggcagaagatattgctgtcgccgggcgtgcagccgaagccgcggtaagtttcgctaaagaaaataaacagatcattgaccccacactacataacgttattggcgggattgatacctcccgcggaggctgtgtcgtgtattgtgcggggaaagtgatcggcgggatcggaattagcggcgcatccgctgaaaaaaatcatcttattgcattacgggctgtcgacagccttaaatcagggagtcaaaaatga

SEQ ID NO: 330 - protein, 169 aa, Shewanella putrefaciencs CN-32
MPEQDIASLISEHRILLEEAVREVIRRYPQSLSPSENFSKHIFSSEQLKNIIDTVLAEAWQQSAMVVITLCDEKGECVLTYRMPGTSAEDIAVAGRAAEAAVSFAKENKQIIDPTLHNVIGGIDTSRGGCVVYCAGKVIGGIGISGASAEKNHLIALRAVDSLKSGSQK

SEQ ID NO: 331 - DNA, 1395 bp, Shewanella putrefaciencs CN-32
atgaataccactgaactggagaatatgatccgcaatattcttgctgataatctgaaagggaccgctactgcccctggaaacattcagcacactatcttcgctcgtgtggaagatgctatcactgccagctacgatgcctataaaaaatacatggcagaacctctggcacttcgaaccaggatcattacagccctgaaggaagagctggcaccctggatcaaagagatgtccgaacgcgccgcagaagaaaccggcatgggtaatgcacccgacaaaatcagtaaaaacactgcggcactgaataatactccggggattgaggatttgaccacaagcgccctgactggtgatggtggcatggttttattcgaactatctcccttcggagtcattggcgctatcgcccccagcaccaatccgaccgaaactatcattaacaacaccatcagtatgctggccgctggtaatgctgtctacttcagcccccatccgggcgcaaaaaaggtatccttgtggcttattgaaaaaatcgaagacatcatttatcgggtaagcgggatccgcaatctggttaccaccgtagcagagcccacctttgacgctactcgcgaaatgatgtcagatccgcgcattgctctgcttgcggttacaggtggtccggcaattgtcaatatggccatgaaaaccggtaaaaaagttatcggtgctggccctggtaacccccctgtactggtggatgagactgcctgtccggtcaaggctgccaaagatatcgttgatggtgcctctttcgatcataacgtcctttgtatcgccgaaaaatgcgtcatcgtagtagatagcatcgccgatcgcctcatggataatatgcagaaaaacgatgcctttctggtaaaaacgcccggtgatattgccagactgcgcaaggtcgttatcaatgacaaaggagaagcaaacaagaaactggtaggtaaaagtccggcagtgatcctgcaggctgctgatctgaacacatcaacagcaccgcgactgattattgtagaagtggagcaggacgatccgctggtgatggtcgaacaattaatgccagttctgcctgttgtacgggtcagtgatttcgagacaggactggcactggctctgaaggtggaaaacgagcagcaccataccgccataatgcattctcagaatgttacccgtctgaacctggctgcgaagaccatgcagacttcaatatttgtgaaaaatggcccttcctatgccggactgggcataggtgccgagggttttaccacctttactattgcgacacccactggcgaagggacaacatcagcacggagcttcgcccgtaaacgccgttgtgtgctgaccaatggattttccatccgctaa

SEQ ID NO: 332 - protein, 464 aa, Shewanella putrefaciencs CN-32
MNTTELENMIRNILADNLKGTATAPGNIQHTIFARVEDAITASYDAYKKYMAEPLALRTRIITALKEELAPWIKEMSERAAEETGMGNAPDKISKNTAALNNTPGIEDLTTSALTGDGGMVLFELSPFGVIGAIAPSTNPTETIINNTISMLAAGNAVYFSPHPGAKKVSLWLIEKIEDIIYRVSGIRNLVTTVAEPTFDATREMMSDPRIALLAVTGGPAIVNMAMKTGKKVIGAGPGNPPVLVDETACPVKAAKDIVDGASFDHNVLCIAEKCVIVVDSIADRLMDNMQKNDAFLVKTPGDIARLRKVVINDKGEANKKLVGKSPAVILQAADLNTSTAPRLIIVEVEQDDPLVMVEQLMPVLPVVRVSDFETGLALALKVENEQHHTAIMHSQNVTRLNLAAKTMQTSIFVKNGPSYAGLGIGAEGFTTFTIATPTGEGTTSARSFARKRRCVLTNGFSIR

SEQ ID NO: 333 - DNA, 1113 bp, Shewanella putrefaciencs CN-32
atgtccctgttcacggtaaaaacgcgggtatatagcggagccgacagtttaacctggctcagaacgctccacggtaaaaagatctggattgtctgcgatggttttctggctggcagccccaatctgaaaatggtcaccgacaatatccacgaggacaacactgtcggtctgtttagcgatatcatccccgatccgcctgtcgctacagtggcggctggtattgaggctatgagtgcgatacagccggatgtagtgatcggtttcggcggtgggtcggcactggattcagcaaaggcgataattttctttggccgcaagcttggcattatggttgagaacttcgttgcaatccccactaccagtggtacgggttctgaagtcaccagcgccagtgttatcagcgatccggccagcagaataaaatacccgttgtttgatgacagtctttaccctgatatagcgcttcttgaaccgcgactggtgctaagcgtaccaccggcagtaacagccaataccgggcttgacgtactgacgcatgcacttgaggcatatgtggccaaaggcgcaacggactttactgatgcactggcagaaaaagcagcacaactggtcatcagtttcctgcccgtcgtatatcgggacggtaatgaactggaagctcgaacccggatgcataatgcttccacgctggccggtatcgccttcagccaggccgggctgggaatgaaccatgccattgctcatcaactgggtggtcaactgcacataccccatggacttgccaacgcgctgttgctgtgccacgtgatccggttcaacagtcgtgatttagccgttcgtgcaaaatatgcacggttaagtaaactgtgtggcctggcaaacttccagtcggcggatgagtattgtgtcgcgagtctaatcacccatctgcacaatctcatgaagcaggttaatgtcgcagacaaccttagcgcattaaacatcactcgcgaacaggtaacgactgctgaaaatgccatgattacagccgctttacaagatgcctgtctatccaccaatccggtaaccgtatcggatacggatatacgtgctattcttagagcgattatatag

SEQ ID NO: 334 - protein, 370 aa, Shewanella putrefaciencs CN-32
MSLFTVKTRVYSGADSLTWLRTLHGKKIWIVCDGFLAGSPNLKMVTDNIHEDNTVGLFSDIIPDPPVATVAAGIEAMSAIQPDVVIGFGGGSALDSAKAIIFFGRKLGIMVENFVAIPTTSGTGSEVTSASVISDPASRIKYPLFDDSLYPDIALLEPRLVLSVPPAVTANTGLDVLTHALEAYVAKGATDFTDALAEKAAQLVISFLPVVYRDGNELEARTRMHNASTLAGIAFSQAGLGMNHAIAHQLGGQLHIPHGLANALLLCHVIRFNSRDLAVRAKYARLSKLCGLANFQSADEYCVASLITHLHNLMKQVNVADNLSALNITREQVTTAENAMITAALQDACLSTNPVTVSDTDIRAILRAII

SEQ ID NO: 335 - DNA, 1290 bp, Shewanella putrefaciencs CN-32
atgaccgaacttcccgacaacatccttcacctgccgcaataccaagtactgggctgcaaatcaaccgacgacgaaatgcacttccaggtggacgtgcccgatcccatcgcctgcgaggaatgcggcgtgcagggtgagttcgtacggttcggcaagcgtgacgttccctatcgtgatctgcccatccacggcaagcgggtcactctctgggtggtccgccgccgatacacctgccgggcctgcaagacaacattcaggccccagctaccggagatggtggacggattccgtatgacactgcggctgcatgagtacgtggagaaggaatccttcaaccacccctacacctttgtggcggcacagaccggcctggacgagaagacggtgcgcgacatcttcaacgcccgcgccgagttcctggggcgctggcaccgcttcgagacgccccgcatcctgggcattgacgagctatacctgaacaagcgctaccgctgcattctgaccaacattgaggagcgaaccctgctcgacctgctggccacccgccgccagaacgtggtgaccaactacctgatgaagctgaaagaccggcagaaggtcgagatcgtcagcatggacatgtggaacccctaccgggcagcggtcaaggctgtgctgccccaggcccgtatcgtggtcgataagttccatgtggtgcgcatggccaacgatgccctagagagagtgcgcaagggcctcagaaaggagctgaaaccgtcccagagccggactctcaagggagaccggaaaatcctgctgaaacgcgctcacgaagtctcagaccgggagcgcctcatcatggagacctggacaggcgcgttcccgcaactgctggccgcctacgagcacaaggagcgcttctacggcatctgggacgccaccacacggctccaggcagaagccgccctggacgagtggatagccaccatcccgaagggccaaaaggaagtctggagcgatctggtcagggcagtgggaaactggcgcgaagagaccatgacctacttcgagacggacatgcccgtcaccaacgcttacacggagtccatcaaccgactggccaaggacaagaaccgtgaagggcgcggttactccttcgaggtgatgcgggcacgaatgctctacaccacgaagcacaagaagaaggcaccgactgcgaaggtctctcctttctacaagaaaaccatcggttacggactgccggacttcgcagaggaactcaactacggagtcgatctatcaaccatctga

SEQ ID NO: 336 - protein, 429 aa, Shewanella putrefaciencs CN-32
MTELPDNILHLPQYQVLGCKSTDDEMHFQVDVPDPIACEECGVQGEFVRFGKRDVPYRDLPIHGKRVTLWVVRRRYTCRACKTTFRPQLPEMVDGFRMTLRLHEYVEKESFNHPYTFVAAQTGLDEKTVRDIFNARAEFLGRWHRFETPRILGIDELYLNKRYRCILTNIEERTLLDLLATRRQNVVTNYLMKLKDRQKVEIVSMDMWNPYRAAVKAVLPQARIVVDKFHVVRMANDALERVRKGLRKELKPSQSRTLKGDRKILLKRAHEVSDRERLIMETWTGAFPQLLAAYEHKERFYGIWDATTRLQAEAALDEWIATIPKGQKEVWSDLVRAVGNWREETMTYFETDMPVTNAYTESINRLAKDKNREGRGYSFEVMRARMLYTTKHKKKAPTAKVSPFYKKTIGYGLPDFAEELNYGVDLSTI

SEQ ID NO: 337 - DNA, 513 bp, Shewanella putrefaciencs CN-32
atgtccatttttggcaaacatctgtcaccgtacgctctgttgtccatctccggcctgctggcagcgtctgatcaggccgtaaaatggctggtgcaacaatcaatggcatatggcgagtctatttcagtgacctcattctttaactgggtacacgtatggaataccggtgccgcattcagtctttttgcgaatggtggaggctggcagcgctacttttttatcggaatcgcggtagtggtctcgatttttctgatcaagctgatccttgaaaatcgtcataaaggagaagccatcgcttgcagtcttatcctcggtggcgccatgggcaacctgattgaccgggtctttcgcggctatgttgtggattcctttgatttctattggcgagactggcattggccggccttcaacctggctgatattgcaattgtcctcggtgccttacttttagtttccagcagcttgttgggtaaaaaagcaaacaccaatgccgagccggatggatctgactga

SEQ ID NO: 338 - protein, 170 aa, Shewanella putrefaciencs CN-32
MSIFGKHLSPYALLSISGLLAASDQAVKWLVQQSMAYGESISVTSFFNWVHVWNTGAAFSLFANGGGWQRYFFIGIAVVVSIFLIKLILENRHKGEAIACSLILGGAMGNLIDRVFRGYVVDSFDFYWRDWHWPAFNLADIAIVLGALLLVSSSLLGKKANTNAEPDGSD

SEQ ID NO: 339 - DNA, 897 bp, Shewanella putrefaciencs CN-32
atgagcaaatcctgtggtggcgcctgtggcggtgatgcaacgtccgcagcggataccgatatacaggcctcctccgaggcgccagggagatgggtcagtgtttatgccgtgccgaagatggactgtccatcagaagaacgaatgattcgcctagccctgaacggctttgaggagattcgggcgctgtccttcgacttgtcgaaccgccggctgaaggtcgtgcatgacggcgaggtcgagcccgtcacctcgaaactgaagaccttggggctaggcgcctcgcttcaggaaaccgtcgctgcaaatccggagaccatcaaggccgccgagttttcggcagcttctgctaagcaagaatccgggaccctgcgctggttgctcggcatcaatgcacttctgttcgtggtggaaatgactgccggtctgatcgcccagtccaccggcctgattggagaatccctggacaattttgccgatgcggcggtgtacgggcttgccctttatgcggttggacatagcgtgaaaatgcaggtacgtgccgcgcatcttgctggtgtactgcaactgatcttggctgtgggcgtgctcgtagaggtggtgagacgctttgtattcggtagtgagcctgaatcgctggtgatgatggctatcgcattcgtcgcattgattgccaataccagttgtctgctgctcatatccaaacatcgggagggcggggcgcacatgaaggcaagctggatattctcggccaacgacgtggtgatcaacctgggggtcatcacctccggcgctctggtcgcgtggaccgggtccaattatccggatctgattatcggcaccatcgcgggggtaattgtacttaacggtgctagacgcattctggcgctcaaggattaa

SEQ ID NO: 340 - protein, 298 aa, Shewanella putrefaciencs CN-32
MSKSCGGACGGDATSAADTDIQASSEAPGRWVSVYAVPKMDCPSEERMIRLALNGFEEIRALSFDLSNRRLKVVHDGEVEPVTSKLKTLGLGASLQETVAANPETIKAAEFSAASAKQESGTLRWLLGINALLFVVEMTAGLIAQSTGLIGESLDNFADAAVYGLALYAVGHSVKMQVRAAHLAGVLQLILAVGVLVEVVRRFVFGSEPESLVMMAIAFVALIANTSCLLLISKHREGGAHMKASWIFSANDVVINLGVITSGALVAWTGSNYPDLIIGTIAGVIVLNGARRILALKD

SEQ ID NO: 341 - DNA, 408 bp, Shewanella putrefaciencs CN-32
atgcgcattggtcagttggcgcagttggtaggggtcgaaacacagacgatccgcttctatgaacagcagggcttgttgccgccgcctgatcggcaggacaacggttaccgtgtctataccgagaagcatggtgaggggctggccttcatccgtcgctgcagaatcctgggcctgtcactggctgagattcacgaactacagagctatcaggacgaccctcatcagccttgtaccgccgtcaacgccttgctcgatgatcacatctctcatgtgcggtcgcagataaccgctctgcaagcgcttgagaaacaactcgtttcactgagagcgagttgcaacgatgaccgggaagttgaggcgtgtggggttcttgctggaattagcgaaggaaacatgcaccagcagtag

SEQ ID NO: 342 - protein, 135 aa, Shewanella putrefaciencs CN-32
MRIGQLAQLVGVETQTIRFYEQQGLLPPPDRQDNGYRVYTEKHGEGLAFIRRCRILGLSLAEIHELQSYQDDPHQPCTAVNALLDDHISHVRSQITALQALEKQLVSLRASCNDDREVEACGVLAGISEGNMHQQ

SEQ ID NO: 343 - protein, 327 aa, Escherichia coli UTI89
ATGACTAAAAAAACACGTTTTTCCCCCGAAGTCCGTCAACGGGCAGTTCGTATGGTTCTGGAAAGTCAGGGCGAATATGACTCACAATGGGCGGCAATTTGTTCCATTGCTCCAAAGACTGGCTGTACGCCGGAGACTCTGCGTGTCTGGGTTCGCCAGTATGAGCGGGATACCGGAGGCGGTGATGGTGGGCTTACCACCGCTGAACGTCAGCGTCTGAAAGAGCTGGAACGTGAAAATCGTGAACTGCGCCGCAGTAACAATATCCTTCGCCAGGCTTCCGCTTATTTTGCGAAGGCGGAGTTCGACCGCCTCTGGAAAAAGTGA

SEQ ID NO: 344 - protein, 108 aa, Escherichia coli UTI89
MTKKTRFSPEVRQRAVRMVLESQGEYDSQWAAICSIAPKTGCTPETLRVWVRQYERDTGGGDGGLTTAERQRLKELERENRELRRSNNILRQASAYFAKAEFDRLWKK

SEQ ID NO: 345 - DNA, 891 bp, Escherichia coli UTI89
gtgatggcactgctggataagctgcgtgagcagtacggggtcagaccggtatgcagtgaactgcatattgccccgtcaacgtattaccactgtcagcaacagcgacatcatcctgataaacgcagtgcacatgcacagcgcgatgactggctgaagagagagatacagcgcgtatacgatgaaaatcatcaggtgtacggtgtgcgtaaagtctggcgtcagttgttacgggaaggaatcagggtggccagatgtacagtggcgcgcctcatggcggttatgggactttccggtgttctccggggtaaaaaggtccgcactaccgtcagccggaaaaccgttgccgcaggtgaccgcgtaaaccgtcagtgcgtggcagaacgtcctgaccagctgtgggtggctgattttacttacgtcagcacatggcagggcttcgtctatgtggcgttcatcattgatgtgtttgccggatacatcgtggggtggcgggtatcatcgtccatggaaacgacattcgtgctggatgcgctggagcaggcgttgtgggcccgtcgtccgtccggcaccatccatcacagcgataaaggctctcagtatgtgtcactggcctatacggagcgattaaaagaagcaaaactgctggcatcaacagggagtacaggcgactcgtatggcagcgcgatggcggagagcatcaatggtctttacaaagcggaggtaatacaccgtaagagctggaaaaaccgtgcagaagtggaactggccacactcacgtgggtggactggtataacaatcgacgattgctgggaaggctgaggcatactcctccggcagaagcagaaaaagcgtattatgcttctatcggaaatgatgagctggcagcctga

SEQ ID NO: 346 - protein, 296 aa, Escherichia coli UTI89
MMALLDKLREQYGVRPVCSELHIAPSTYYHCQQQRHHPDKRSAHAQRDDWLKREIQRVYDENHQVYGVRKVWRQLLREGIRVARCTVARLMAVMGLSGVLRGKKVRTTVSRKTVAAGDRVNRQCVAERPDQLWVADFTYVSTWQGFVYVAFIIDVFAGYIVGWRVSSSMETTFVLDALEQALWARRPSGTIHHSDKGSQYVSLAYTERLKEAKLLASTGSTGDSYGSAMAESINGLYKAEVIHRKSWKNRAEVELATLTWVDWYNNRRLLGRLRHTPPAEAEKAYYASIGNDELAA

SEQ ID NO: 347 - DNA, 579 bp, Escherichia coli UTI89
atgcttctgcctatgaatacagaaacccaacatcataaaaaagatcccatccgtctgtatcagcagttgctggagtctgcagctatgattgctggtcgtgacggtatcgctgccctctcgctgaatgcggttgcccgcgaagctggcgtgagtaaaggtggattactgcatcactttccgaacaagcaggcgctgatctacgccttgtttgcccggttgttggcaataatggaagaggccatcgctgccctgatgcaaaaagacaatataagctatggccgttttactcgcgcatatgtgaactatctttctgcgctgactgacacacaagaaagccgtcaattgatggtgctttcgctggcaatgcccgatgaaccggtgctgcgaaaatgctggcgagactggatgcttggtcatttagcgaatggcgatgaactggataatagcccaaccggaacgctggtgcgctataccgcagatggcatctggttgtctgagttaacggaagggatcaccatgagccccgaacatcgtcaggcactggttgattcactgaataagatgacacttcccgcgtga

SEQ ID NO: 348 - protein, 192 aa, Escherichia coli UTI89
MLLPMNTETQHHKKDPIRLYQQLLESAAMIAGRDGIAALSLNAVAREAGVSKGGLLHHFPNKQALIYALFARLLAIMEEAIAALMQKDNISYGRFTRAYVNYLSALTDTQESRQLMVLSLAMPDEPVLRKCWRDWMLGHLANGDELDNSPTGTLVRYTADGIWLSELTEGITMSPEHRQALVDSLNKMTLPA

SEQ ID NO: 349 - DNA, 819 bp, Escherichia coli UTI89
atgcgctataacatcaatgcccgtttcatttatgacgctacggatggcacgcttacgctaccgcaaagcactgagccagactgccaactctcgataacgtcctgcgcgctgctcaacttttttttgcatcataccgatatcgttagtcgcgaagaggtactgacaaaagtttgggataacaacggattaacttcttctaacagcaatctgaatcagtatctcagtatgctgcgcaagacgttccgtcactatggtattgataatattatcattaccgttgcacgcggctatctgcagctaaacccgaatgtatccatcgaaccactggatgaagcccctgcgccacctgcaattatagagccatccataatccctgatgttgacgtaccaacatccagtgaggataccgagtcttcaccaccaacattagcgccagtcacccatcgtcacgacgcttactggtattttgcaggtgcctgtttgttaaccatttcgattctgttggtagccttcaatttgttcggtatcagcgaggcgcgccccatcgctttgacgcaactttctcatagccagtgcgaattactggcaagcgacgaaatgcgccgttcagtaagcgtgaaggcatatgagaaaaattatgacgaagtccgtaagcgtctaaatatcgcctgtaaaccaagtgagcgttttctttttttctacggtgacaggctggaaaccaacggccttgggcgagtgttcctcgcgcactgcgctatgcatgaaaataacccgtttagttattgcgataactacttttattactcttggaaactgtaa

SEQ ID NO: 350 - protein, 272 aa, Escherichia coli UTI89
MRYNINARFIYDATDGTLTLPQSTEPDCQLSITSCALLNFFLHHTDIVSREEVLTKVWDNNGLTSSNSNLNQYLSMLRKTFRHYGIDNIIITVARGYLQLNPNVSIEPLDEAPAPPAIIEPSIIPDVDVPTSSEDTESSPPTLAPVTHRHDAYWYFAGACLLTISILLVAFNLFGISEARPIALTQLSHSQCELLASDEMRRSVSVKAYEKNYDEVRKRLNIACKPSERFLFFYGDRLETNGLGRVFLAHCAMHENNPFSYCDNYFYYSWKL

SEQ ID NO: 351 - DNA, 519 bp, Escherichia coli UTI89
atgagaatcgcaccgcgtaccttctttgctatttccgccctggcgtttattgtcgcctccggatttagtttctggcggttgtcccctgctgaaaatacagggattatgagttgttcaacaaaaggcatcatgcgttttgagaatatggaaaaggagaacgttaacggtaatattcactttaactttggcagccagggtaaaggttcgatggtgctcgaaggctacacggactctgccgctggctggctgtacctgcaacgctatgtcaaatttacctataccagtaaacgtgtttccgccacggaacgccattaccgcatcagccagtgggaatccagcgcctcatcgatagatgaatcaccagatgtgatttttgactactttatgcgtgaaatgtctgacagccatgacgggctgttcctcaacgcccagaagctgaacgataaagcgattttgctcagttctattaattcaccgctttggatctgtacccttaaatctggcagcaaattagactag

SEQ ID NO: 352 - protein, 172 aa, Escherichia coli UTI89
MRIAPRTFFAISALAFIVASGFSFWRLSPAENTGIMSCSTKGIMRFENMEKENVNGNIHFNFGSQGKGSMVLEGYTDSAAGWLYLQRYVKFTYTSKRVSATERHYRISQWESSASSIDESPDVIFDYFMREMSDSHDGLFLNAQKLNDKAILLSSINSPLWICTLKSGSKLD

SEQ ID NO: 353 - DNA, 261 bp, Escherichia coli UTI89
atgtatttgtgctggagtggtggggaggattttgtttttaataatgcgctttttggcgtatttttttcgccgggtatgtttgttgctaagttgctaaataattacgaaaagggggtaacagctacagcggtgaagtgtgttggggctcatactttggcgcaaaccctaaacgcaaaaaatgcgcttttgctcagggccgttgagaaggggaaaatggaatgcgtggtacatcacaaatcgcctgtgctatcacgaagttaa

SEQ ID NO: 354 - protein, 86 aa, Escherichia coli UTI89
MYLCWSGGEDFVFNNALFGVFFSPGMFVAKLLNNYEKGVTATAVKCVGAHTLAQTLNAKNALLLRAVEKGKMECVVHHKSPVLSRS

SEQ ID NO: 355 - DNA, 279 bp, Escherichia coli UTI89
atgggtgatgcattagggcttatcgaaaccaaaggcctggtggcctgtattgccgcagcggatgcgatgtgtaaatccgccaacgttgaactgattggctatgaaaacatcggctctggtctggtgaccgtgatggtgaaaggcgacgttggcgcagtgaaagcatctgtcgattctggacttgagtccgcacagcacatcggggaagtggtgacgtcgctggttatcgcgcgtcctcacaacgacatcaacaaaatcgttattaaacataaagcttaa

SEQ ID NO: 356 - protein, 92 aa, Escherichia coli UTI89
MGDALGLIETKGLVACIAAADAMCKSANVELIGYENIGSGLVTVMVKGDVGAVKASVDSGLESAQHIGEVVTSLVIARPHNDINKIVIKHKA

SEQ ID NO: 357 - DNA, 285 bp, Escherichia coli UTI89
atgggtgatgcattaggtctgattgaaaccaaaggtttggtggcttgtattgaagcagctgacgcgatgtgtaaggccgccaacgttgagttgattggctatgaaaacgtcggttctggtctggttaccgcaatggtgaaaggtgatgtcggcgcagtaaaagcggcggtggattccggtgttgagtccgcacagcgcattggcgaggtggtgacgtcgttggttatcgcgcgtccacacaatgacatcaacaagattgtctcgcactacaaaattaccgattaa

SEQ ID NO: 358 - protein, 94 aa, Escherichia coli UTI89
MGDALGLIETKGLVACIEAADAMCKAANVELIGYENVGSGLVTAMVKGDVGAVKAAVDSGVESAQRIGEVVTSLVIARPHNDINKIVSHYKITD

SEQ ID NO: 359 - DNA, 279 bp, Escherichia coli UTI89
atgagagaagcgcttggtctgatcgaaaccaaaggtctggtggcctgtattgaggcggcagacgcgatgtgtaaagccgccaacgttgagttgattggctatgaaaacgtcggctctggcctagtcaccgcgatggtaaaaggcgacgttggcgcagtgaatgccgcggtggattccggtgttgaagcagcaagacgtatcggtgaagtggtgacctcccgtgtcatcgcccgcccgcataacgacatcgaaaaaatcgcgtcgcagcataaagcatga

SEQ ID NO: 360 - protein, 92 aa, Escherichia coli UTI89
MREALGLIETKGLVACIEAADAMCKAANVELIGYENVGSGLVTAMVKGDVGAVNAAVDSGVEAARRIGEVVTSRVIARPHNDIEKIASQHKA

SEQ ID NO: 361 - DNA, 1587 bp, Escherichia coli UTI89
atgattgaactggataccgatttgcgctcccgtcagaacgcgcgggtgctggtgcgtaacgccaaaaaagcgcaagcgattatggccactttttcgcagcagcaaatcgacgccatcgtgaaaaacgtggcccaggaagcagcacaccacgctgaagcactggcaaaaatggccgcagaagaaactggcttcggcaactggcaggataaagtcctgaaaaaccgtttcgcctcgctgcgtgtttacgatgccatcaaagatatgaagaccgtcggcatcattcatgacgatcaacagcaaaaagtgatggacgtgggcgtgccgctgggtgtgatttgcgccctggtgccgtcaaccaacccgacttccaccatcttctacaaaacgctgatcgccctgaaagccggtaatgcgattattttctctccgcatcccggcgcacgtcagtgtagctggaaggcgatagaagtcgttaagcgtgccgcagaagctgctggtgcacctgcgggtattgtcgatggtgtaaccgagctcacgctggaagcaacccaggaactgatgcatagcaaagatgtttcgctgattctggctaccggtggtgaaggaatggtacgagcagcatatgcttctggcacaccgaccatcagcggtggtcctggtaacggtccggcatttattgaacgcagtgcggatatccaccatgcggtgaaagatatcatcaccagcaaaaccttcgataatggtgtgatctgcgcttctgaacagtcgattattgttgaacgctgcatttacaacgaagtacaccgcgaactggaagctcagggtgcttactttatgaacgaagatgaagcggcaaaaatggcagctctgctgctgcgcccgaacggcacgattaacccgaaagtggtgggaaaaaccgcactgtatttaagccagatggccggtttttgtgtgcccgccagtaccagagtactgattgccgaacaaactaccgtttctcacaaaaacccctactcacgtgaaaagctgtgcccggttcttggtctgtatatcgaagaggactggaaagctgcctgccaccgcgtggtggagttgctgactaacgaaggtctgggccacacactggtgatccatacccgcaaccaggatgtgatccgtcaattctgccttgaaaaaccggttaaccgcattctgatcaatacccctgcggcgcttggcggtattggcgctaccactaacattacccccgccctgacgcttggatgcggtgcggtaggtggtggttcctcttccgataacgtcgggccaatgaatctgctcaacattcgtaaagtgggctatggcgtgcgttccatcgatgagttgcgttctccgggtagccgtgcagaaccgcagccagccatcgccgcgccgatagtggatccgcatcgcagcattcttgacgatgcccgcttcacctcccctgccccggcaaccacatctgctgatgatcgttttactgtggcaacgactgatcccgaaggcgagatcaacgagcagaacgttgagcgagtcatccgccaggtgcttgagcgcttaggcaagtaa

SEQ ID NO: 362 - protein, 528 aa, Escherichia coli UTI89
MIELDTDLRSRQNARVLVRNAKKAQAIMATFSQQQIDAIVKNVAQEAAHHAEALAKMAAEETGFGNWQDKVLKNRFASLRVYDAIKDMKTVGIIHDDQQQKVMDVGVPLGVICALVPSTNPTSTIFYKTLIALKAGNAIIFSPHPGARQCSWKAIEVVKRAAEAAGAPAGIVDGVTELTLEATQELMHSKDVSLILATGGEGMVRAAYASGTPTISGGPGNGPAFIERSADIHHAVKDIITSKTFDNGVICASEQSIIVERCIYNEVHRELEAQGAYFMNEDEAAKMAALLLRPNGTINPKVVGKTALYLSQMAGFCVPASTRVLIAEQTTVSHKNPYSREKLCPVLGLYIEEDWKAACHRVVELLTNEGLGHTLVIHTRNQDVIRQFCLEKPVNRILINTPAALGGIGATTNITPALTLGCGAVGGGSSSDNVGPMNLLNIRKVGYGVRSIDELRSPGSRAEPQPAIAAPIVDPHRSILDDARFTSPAPATTSADDRFTVATTDPEGEINEQNVERVIRQVLERLGK

SEQ ID NO: 363 - DNA, 258 bp, Escherichia coli UTI89
atgattctcgcaaaggtaaccggacatgtcgtcgccacgcaaaagtgcgatgagctgcgcggcagcaacctgttgttgatcacccaactggatgataaccaacagctgatgaaggaccgctcctgggtcgctgtcgatagcgtcggtgcaggcgttcatgacgttgtgctggcggaggagtacttcgcactcaataaagatcgttacaaagcgatgtcagtggtcgccattgtcgagaaggtttttcgggacgcttaa

SEQ ID NO: 364 - protein, 85 aa, Escherichia coli UTI89
MILAKVTGHVVATQKCDELRGSNLLLITQLDDNQQLMKDRSWVAVDSVGAGVHDVVLAEEYFALNKDRYKAMSVVAIVEKVFRDA

SEQ ID NO: 365 - DNA, 1155 bp, Escherichia coli UTI89
atgagtgagtttttgctgaaaccccggatctgcttcggtcaagacgcgctgtcagtcctggacgagctaaccgcctgtcatgttttgctggttaccgatcaggcgatggtcaaattcggtcttgctgaacgtgtcacgcagcgtctctgtgcgcgcggcattgactggcaggtgtgggatgacgttgtcgccgatccggatatcgctaccgtggtccgagggatgaagttgatggacagctgctacccggatctggttatcgcactcggcggtggttcggtcattgacgcagccaaagcggttattttcgccctggcgcaaacccgtccggaagcaggacgtgaacgcccctgctttgtggctattccaaccaccagcggtacgggctcagaagtgaccagtttctcggtggtgaaagcccatgccgaaaaactggtgctggttgactcgtcgctgctaccggatatcgccattcttgatccgtcactggtggcatccgtgccacctgctatcaccgctgacaccggaatggatgtgttgtgccacgctctggaggcttatgtctcccttgccgccagcgacttttccgatgcacttgctgaaaaagtggtgcaacaggtgttcagctacctgccgggctgctggcgtaacggccaggatttgcaggctcgggagaaaatgcacaacgcctcatgtatggcaggaatggcgtttaccaatgcctctcttggcatcacccatagcctggctcatgcccttggtggtgttttccgtgtccctcatgggcgcgcaaatgccctgctaatggcacacgttgtggcatggaatgctgactaccacggtcaatgcgacacccttgctgcgcggaaatatgcacgtctggcacatctgttggatctgcctgccagcacgcctcgtgaaggagtaacaagcctgctggtcgcaatccaaacgctgaaagatgaaatgaatatgcccagggggattaacgacaccggcgtgaatgccgctgatttcgatcagcgcctggcggagatggttgcccaggcactgcgtgacagttgcaccccaaccaacccgcgcgaaccggatgcccgcgccctgactgaactttatcgccaggcctggagcggcaatatcgctcaatgccactga

SEQ ID NO: 366 - protein, 384 aa, Escherichia coli UTI89
MSEFLLKPRICFGQDALSVLDELTACHVLLVTDQAMVKFGLAERVTQRLCARGIDWQVWDDVVADPDIATVVRGMKLMDSCYPDLVIALGGGSVIDAAKAVIFALAQTRPEAGRERPCFVAIPTTSGTGSEVTSFSVVKAHAEKLVLVDSSLLPDIAILDPSLVASVPPAITADTGMDVLCHALEAYVSLAASDFSDALAEKVVQQVFSYLPGCWRNGQDLQAREKMHNASCMAGMAFTNASLGITHSLAHALGGVFRVPHGRANALLMAHVVAWNADYHGQCDTLAARKYARLAHLLDLPASTPREGVTSLLVAIQTLKDEMNMPRGINDTGVNAADFDQRLAEMVAQALRDSCTPTNPREPDARALTELYRQAWSGNIAQCH

SEQ ID NO: 367 - DNA, 3423 bp, Escherichia coli UTI89
atgccactgataacaagaactggagacccttaccttatggcaaactacaatttaacaccgcgcgtaaaagtgctggctgaacgtttactggctcaccccagtaccctgtgcgttgaacatgccgggatcctgagtgggctggatggtgatatcgcgggcattcccgccgcagtaaaacccgctcgccgtttctatgaactgatgcgccagctaccgctcgctgttagccccgatgaactgattgttggcaatcagactcatcgtccgcatggtgcgattttccacgacgaaagtacggcccaccgcccgtctgtttttcagtttcttaatctaaatagcgaccttgatgccccggattataaactggtgatcgaaaaaggcgtgctggcaatcaaacagcaattggaagagaaaacccgctcactgggcagcgccgttagccgcagtggtatggatgaagtcaacgcttgccgcgccgcgatttatgcctgtgatgccctgatgcagttagcgcaaaatctggccaccagcgccgaaaaactggctgcaactgagacaaatgcgtatcgcaaagctgagttatctgaaagtgccgccattttgcaccatatcccagcgcgtcctgctcgtagttttaaagaggcttgccaggcattttatctgttccagttagcactccagttagataatggtagctatgctgttaacccggaaggcgcagataaagcgctgctggcgtattatcagcatgatattgccaacggtctgctgaccgaggcgcaggcttacgaaattgtcgaatgtttgtggtttaaactggcagaactgagtgaagtccgcgcagcttgtgctatcgatggctacccgatgttcgatgctctgttgcacggtgcaagccttgagaacgcagtgattaaccctctttcagagatgttcctcaatgcacaacgtaacctgagcgcgctaaatctgcccatacgtctgttccatggcgcccacaaaaccgttaccacactatgtgccgcctgtaacgaaacgccagtgctggaaggcctgacaccacgtatccaacgtctgcgtaaccactacctgactgtccgcccgagtgtttctatttaccgtgcactggcttttaccgaagtagtgaaagcgaatccaggaatgccaaccatcctgctgcgtgctaaagcgttccgtcacgcctgtgaaactgcgccgattttgattcaggacgatgagctgatcgtcggtcatccttgcggtaaaccgcgtgctggcgcattttcacctgatattgcctggcgctgggtgcgtgacgaactcgataccatgagtactcgcccgcaggatccgtttgaaatcagcgaagaagataaaaaaaccattcgcgaagagattgtaccgttctgggaggggcgctcgctggatgaaatttgtgaagcacaataccgcgaagctggcgtttggtcgttcagtggcgaaacattcgtcagcgacctctcctatcatcaggttaacggtgggggtgatacctgtccgggctacgatgtgctgctgtttaccaaagggatgaatggcatcaaagccgatgccgaggcgcatcttgccgaactgagcatggaaaacccggaagatatcgatcgcatttactactacaaagcagcgatcgacacctgtgaaggggtgatcaactatgcgcatcgtattgccgcccgtgcccgtgaactggctgccgttgaacagaacgcccagcgtcgagcagagctactgactatcgcagaagttaaccagaacgttccggcgaatccgccgaaaaccttgcaggaagcgctgcaaagtatctggacggtagagtcactgtttgagattgaagagaaccagacaggcctgtcacttgggcgtgttgaccagtactgctacccgatgtttgaagcagatatccgtgaaggtcgcctgactcatgaaggtgcactggagctgatgcaggcatttatcatcaaatgtgccgagctgatgtggatgtccagcgaactgggagcgaaatattttgcgggttatcagccatttatcaacctgactgtcggtggtcaaaaacgtagcggtggcgatgcctgcaacgatctcacctatctgattatggatgcagtccgttttgtgaaagtgtatcagccatcactggcttgccgtatccataaccagtcgccgcaaaaatatatggaaaaaattgtcgatgtggtgaaagcggggatgggcttcccagcctgtcacttcgatgactcccatatcaaaatgatgctgcgcaaaggctttgactttgaagatgcccgtgattactgcctgatgggctgcgtggaaccacaaaaatcaggtcgtatttaccagtggacttccaccggctacacccaatggccaattgccatcgagtttgtcctcaaccgtggtcgtatggtgctgtttgatagctatcaggggctggacacgggcgatctgaaagatctgcgcacattcgaagattttgatgccgcggtgaaaaaacaagttgctcatatcatacgcttgtccgccatcggtacggtcatcagccagcgtgtgcaccgggacgtggcaccaaaaccgctgatgtcgctactggttgaaggctgcatggaaaaaggcaaagacgtctctgccggtggcgcaatggtaaaccacggacctgggctgattttctctggtctggctacctacgtcgattcaatggcggccatccgcaaactggtttacgaagataagaaatatacccttgaacagatacgggacgctctgctggcaaactttgaaggttatgaaggcttgcgtcgcgactgtctgaacgcaccgaaatacggcaacgacgataactacgttgaccagtacgctctggatatcaccgagtggactgaacgtgaatgccgcaagtacaagatgctctactccaccctcagccacggtacgttgtcgatctccaacaatacgccgattggtgagctgaccaatgccacaccaaatggtcgtctggcgtggatgccgctttctgacgggatcagcccgactcaaggggcggataagcatggcccaacggcgattatcaagtctgtgagcaaaatgaacgttgaaaccatgaatatcggcatggtgcataacttcaaattcctcaaagggttacttgatacacctgaaggacgccacggcctgataactctactgcgtacagcatcaattctcggcaacggtcagatgcagttcagctacgtcgataacgaagtactgaaaaaagcacaacaggaaccggaaaaataccgtgatttgatcgtccgtgtagccggttacagcgcctacttcgtggaattgtgcaaggaagttcaggacgaaatcatcagccgtacggtgattgagaagttctga

SEQ ID NO: 368 - protein, 1140 aa, Escherichia coli UTI89
MPLITRTGDPYLMANYNLTPRVKVLAERLLAHPSTLCVEHAGILSGLDGDIAGIPAAVKPARRFYELMRQLPLAVSPDELIVGNQTHRPHGAIFHDESTAHRPSVFQFLNLNSDLDAPDYKLVIEKGVLAIKQQLEEKTRSLGSAVSRSGMDEVNACRAAIYACDALMQLAQNLATSAEKLAATETNAYRKAELSESAAILHHIPARPARSFKEACQAFYLFQLALQLDNGSYAVNPEGADKALLAYYQHDIANGLLTEAQAYEIVECLWFKLAELSEVRAACAIDGYPMFDALLHGASLENAVINPLSEMFLNAQRNLSALNLPIRLFHGAHKTVTTLCAACNETPVLEGLTPRIQRLRNHYLTVRPSVSIYRALAFTEVVKANPGMPTILLRAKAFRHACETAPILIQDDELIVGHPCGKPRAGAFSPDIAWRWVRDELDTMSTRPQDPFEISEEDKKTIREEIVPFWEGRSLDEICEAQYREAGVWSFSGETFVSDLSYHQVNGGGDTCPGYDVLLFTKGMNGIKADAEAHLAELSMENPEDIDRIYYYKAAIDTCEGVINYAHRIAARARELAAVEQNAQRRAELLTIAEVNQNVPANPPKTLQEALQSIWTVESLFEIEENQTGLSLGRVDQYCYPMFEADIREGRLTHEGALELMQAFIIKCAELMWMSSELGAKYFAGYQPFINLTVGGQKRSGGDACNDLTYLIMDAVRFVKVYQPSLACRIHNQSPQKYMEKIVDVVKAGMGFPACHFDDSHIKMMLRKGFDFEDARDYCLMGCVEPQKSGRIYQWTSTGYTQWPIAIEFVLNRGRMVLFDSYQGLDTGDLKDLRTFEDFDAAVKKQVAHIIRLSAIGTVISQRVHRDVAPKPLMSLLVEGCMEKGKDVSAGGAMVNHGPGLIFSGLATYVDSMAAIRKLVYEDKKYTLEQIRDALLANFEGYEGLRRDCLNAPKYGNDDNYVDQYALDITEWTERECRKYKMLYSTLSHGTLSISNNTPIGELTNATPNGRLAWMPLSDGISPTQGADKHGPTAIIKSVSKMNVETMNIGMVHNFKFLKGLLDTPEGRHGLITLLRTASILGNGQMQFSYVDNEVLKKAQQEPEKYRDLIVRVAGYSAYFVELCKEVQDEIISRTVIEKF

SEQ ID NO: 369 - DNA, 948 bp, Escherichia coli UTI89
gtgagcgcaaataaagaattaagcggacgaattttcaatatccagaaatattcgatctacgacggtgacggtatccgcacactgattttttttaaaggctgcaatcttcgctgcccgtggtgtgccaacccggaagggttaagcagccagtttcaggtgatgttctctcaggataaatgcatcaactgcggcgactgcgtcaatgtatgccctgcggggatccactaccgcgcggaagtcaacggagaaatgaagcatttcgtcaaccgtaataaagactgcattggttgtcgcaagtgtgaagaaatttgcacccaaaatgcactggatatcatgggtaaagatgtcacggtcagtgaattgatggagatcatcatgcaggactatgacttttacgtctcctccggcggtggtgtcactattgggggcggtgagatgagcttgcaaactgattttgccgttgccctgttcagtgaatgcaaaaagatgatgatcaacaccgccgtcgagacccagggtacaaccccgcttgcaaactatcagaagctggctccggtcaccgacaccttcctgttcgatatcaaacagatcgatagcaatcaccataaaacgctgttcggaattggcaacgaaggcgtgcgtcgcaatctggagtggctggtggattcgggggccaacgtgattgttcgtatgccgctgattcgtggttataacgattcgtgggaagcgattaccggcgctatcgactacgtccagaaactggccaaacgcggcaatattcgccgaatcgatatactgccgtaccaccagctggggcgcaaaaagtatgaacgactggagatgccctacccgattgttgaagacccgtcatacagcgtggaagagctggacaaactggaggcgtttttcgcccagttcgattttgatattcgcttagttcgtcattaa

SEQ ID NO: 370 - protein, 315 aa, Escherichia coli UTI89
MSANKELSGRIFNIQKYSIYDGDGIRTLIFFKGCNLRCPWCANPEGLSSQFQVMFSQDKCINCGDCVNVCPAGIHYRAEVNGEMKHFVNRNKDCIGCRKCEEICTQNALDIMGKDVTVSELMEIIMQDYDFYVSSGGGVTIGGGEMSLQTDFAVALFSECKKMMINTAVETQGTTPLANYQKLAPVTDTFLFDIKQIDSNHHKTLFGIGNEGVRRNLEWLVDSGANVIVRMPLIRGYNDSWEAITGAIDYVQKLAKRGNIRRIDILPYHQLGRKKYERLEMPYPIVEDPSYSVEELDKLEAFFAQFDFDIRLVRH

SEQ ID NO: 371 - DNA, 465 bp, Escherichia coli UTI89
atgaacagtttaggcgtaattgaaacacgtggtcttgtagccgcaatccaggccgtagatgccgcctgcaaagcagccggggtgacctgtattggttatcgcaaagtaggttccgggctggtaaccgtctgttttgatggggaaatcagcgcagtttacacggccattgaacgtggtattgctgtggcatccgcaaccgaccatcaggccaaatcactggtgatcgctcgcccggaacgctgcgtggttgaggctctcagcaacctgaaaggtcatccgccacgtgtcgaatcaggccagaaacctcatgcagagctgccgacagttgcagaaatggctgtctgcgaggaaaccgctgaagtttctacagatactgaaactgcaatgcctgtacctgagaaagaagtgcaagcccccatcgtggaagtgaaaagccacgggcataagaaagggaagaaagcatga

SEQ ID NO: 372 - protein, 154 aa, Escherichia coli UTI89
MNSLGVIETRGLVAAIQAVDAACKAAGVTCIGYRKVGSGLVTVCFDGEISAVYTAIERGIAVASATDHQAKSLVIARPERCVVEALSNLKGHPPRVESGQKPHAELPTVAEMAVCEETAEVSTDTETAMPVPEKEVQAPIVEVKSHGHKKGKKA

SEQ ID NO: 373 - DNA, 621 bp, Escherichia coli UTI89
atgattgacgcactgctacaggaaaaaatcaccacgcgactgatcgatactgctcccactattccggtcggtgtttctaatcgtcatgtgcatctgtcgcagcaggatgttgaagcactttttggtgttggctaccaacttacgccctttaagccgttgcgccagcctgggcaattcgccgctgaagagtgtgtaacggttgtcggcccgaaaggttctctgactcacgtccgcgtacttggaccggttcgcccgacaagccagctggaaatctcacgtgccgattgttttactctcggcattaaagcgccagtgcgtgaatccgggcaactggaaaatgccggtgacgcactgttggtggggccgaaaggtcatgttgagttgcattcacaagtcatttgcgcctggcggcatattcatatgtctccccaggatgctcgtctgttgaatgtcagcaatgggcagaaggtgagtgttcgcagtcatggtgaacgccagttaacgttcgatgaagtggtggtacgggtgcgcaatgattttgcccttgaactgcatatcgatacggaagaagccaatgctgccggactgaaaaacggggcgcaggtaacactgattcgctaa

SEQ ID NO: 374 - protein, 206 aa, Escherichia coli UTI89
MIDALLQEKITTRLIDTAPTIPVGVSNRHVHLSQQDVEALFGVGYQLTPFKPLRQPGQFAAEECVTVVGPKGSLTHVRVLGPVRPTSQLEISRADCFTLGIKAPVRESGQLENAGDALLVGPKGHVELHSQVICAWRHIHMSPQDARLLNVSNGQKVSVRSHGERQLTFDEVVVRVRNDFALELHIDTEEANAAGLKNGAQVTLIR

SEQ ID NO: 375 - DNA, 666 bp, Escherichia coli UTI89
atgaccgaacaacagatcgacaccatcgtcaacctgatcctccagcggctgcaacctgcggtactggtcatggtgacatctgcggatggctatcgggatctgattcatcagcggttggctcgttgtggcgaacggttgcatctggcgctggatgaaacaatcagtgatagcgaacggtggcagcaaattggtgacgtgatacccgctaaaacatggcaacacaaattgccttcaacgccctataaagcgttattgctgccgtttttgagttacccgctggctgtagatattgtcaacggtacgctgcaaagcccggtagcgcaaagggttcacgatgcgctactggcgggtattccggtactggcactgcgttattactgcgatccgcacagcgaattaaacgcgcttcgcggtactgttcacagcgactacgcggcgcatctttccgccacgcttaccggccttagcgagtgtggcattacgttatgttccatgaatgaaatgctggaaaaactggcaacagacgtcagcagtcaatcgcctgtaagtcatcatcggcgttatctgactgtcaccgatatcgtcaataatccggcactggcaaaatcacccgacgccgtactgaccgatgctgcggtcgattttttgaaagcacagaaaaaataa

SEQ ID NO: 376 - protein, 221 aa, Escherichia coli UTI89
MTEQQIDTIVNLILQRLQPAVLVMVTSADGYRDLIHQRLARCGERLHLALDETISDSERWQQIGDVIPAKTWQHKLPSTPYKALLLPFLSYPLAVDIVNGTLQSPVAQRVHDALLAGIPVLALRYYCDPHSELNALRGTVHSDYAAHLSATLTGLSECGITLCSMNEMLEKLATDVSSQSPVSHHRRYLTVTDIVNNPALAKSPDAVLTDAAVDFLKAQKK

SEQ ID NO: 377 - DNA, 402 bp, Escherichia coli UTI89
atgtcttcgaaaacaaaatgctggctatggatgttactggtcatcctttctgaaacctctgcaacatccacacttaaaatgttcgataacagtgaggggatgacaaaaacgctgctgctggccctaatcgtcgtactgtattgcatttgttactactcgctttcacgggcagtaaaagatatccccgttggtctggcttacgccacatggtccggtactggcattttgatggtttcaacccttgggattttattttacggtcaacacccggataccgccgccattattggtatggtcatcatagccagcggtattatcattatgaatctgttctcaaaaatgggcagtgaagaggcggaagaaactccagttaccaacctcgataaaaaaatcgctaactga

SEQ ID NO: 378 - protein, 133 aa, Escherichia coli UTI89
MSSKTKCWLWMLLVILSETSATSTLKMFDNSEGMTKTLLLALIVVLYCICYYSLSRAVKDIPVGLAYATWSGTGILMVSTLGILFYGQHPDTAAIIGMVIIASGIIIMNLFSKMGSEEAEETPVTNLDKKIAN

SEQ ID NO: 379 - DNA, 330 bp, Escherichia coli UTI89
atgtttaatattggatttttatggctggcactttccatcggttctgaaataaccggtacgtcaatgatcaaaaaaaccaatggttttaggcgactgtggccttctgttctggtggtatgtgcttattcaacgtgttatttcgctctgaccagagcaatgagtactattccggttggtgttgcctattcactctggtgcggctttgggattgttggcgtgacaattttctcgatgattctttataaacaaaagcccgatttacctgccatattctccatgttgctgattattagtggcggcattattatgaatgtattttcaaacatgtaa

SEQ ID NO: 380 - protein, 109 aa, Escherichia coli UTI89
MFNIGFLWLALSIGSEITGTSMIKKTNGFRRLWPSVLVVCAYSTCYFALTRAMSTIPVGVAYSLWCGFGIVGVTIFSMILYKQKPDLPAIFSMLLIISGGIIMNVFSNM

SEQ ID NO: 381 - DNA, 951 bp, Escherichia coli UTI89
gtgattatggaaccccttcgtgaaataagaaatcgactgcttaacggctggcaactatcaaaactgcatacttttgaagtggctgccaggcatcagtccttcgctctcgcggcagaggaattgtcgctgagccccagtgcggtaagtcaccgtatcaatcagctggaagaagaattaggtattcagttgtttgttcgttcccatcgcaaagtggaattaacgcacgaggggaaacgcgtttattgggcgctaaaatcgtcgctggataccctgaaccaggaaattcttgatatcaaaaatcaggaattatcgggaacgttaacgctgtattcccggccctctatcgcccaatgctggttggtgcccgcattaggtgactttacacgccgctatccgtctatttcgctcaccgtgctcaccggtaatgacaatgtcaatttgcaacgtgccggaatcgatttggcaatctactttgatgacgcgccgtcagcgcaactgactcatcactttctgatggatgaagaaatcctgcctgtatgtagcccggaatacgctcaaagacatgctttaaccaaccaggtaattaaccttcgccactgtacgttgctccatgacagacaggcctggagcaacgactccggtacggatgaatggcatagttgggcgcaacattatgcggttaatttgccgacatcttcgggaattggctttgatcgttctgatttagctgttatcgccgcgatgaatcatattggggtggcgatgggaaggaaacgcctggtacaaaaaagacttatcagtggtgagctcgtcgcgccgtttggcgatatgacggtgaaatgccatcagcattattacatcaccacattaccgggcaggcagtggccaaaaattgaggcatttattacctggctaagagagcaggtatgtcagtcttgtcagtatcagtga

SEQ ID NO: 382 - protein, 316 aa, Escherichia coli UTI89
MIMEPLREIRNRLLNGWQLSKLHTFEVAARHQSFALAAEELSLSPSAVSHRINQLEEELGIQLFVRSHRKVELTHEGKRVYWALKSSLDTLNQEILDIKNQELSGTLTLYSRPSIAQCWLVPALGDFTRRYPSISLTVLTGNDNVNLQRAGIDLAIYFDDAPSAQLTHHFLMDEEILPVCSPEYAQRHALTNQVINLRHCTLLHDRQAWSNDSGTDEWHSWAQHYAVNLPTSSGIGFDRSDLAVIAAMNHIGVAMGRKRLVQKRLISGELVAPFGDMTVKCHQHYYITTLPGRQWPKIEAFITWLREQVCQSCQYQ

SEQ ID NO: 383 - DNA, 1338 bp, Escherichia coli UTI89
atgcactctcaaatctgggttgtgagcacgctgcttatcagcatcgtgttaattgtactgaccatcgtgaagttcaaattccacccgtttctggcgctgttgctggccagcttcttcgtgggaacgatgatgggtatgggaccactggatatggtaaatgctattgaaagtggaattggcggaacgctggggttccttgctgcggttatcggcctgggcacgatactgggaaaaatgatggaagtatccggggccgcagaaagaattggtctgacacttcaacgctgtcgctggctttcagctgatgtcattatggtgctggttggcctgatttgcggcatcacgctgtttgttgaagtgggcgtcgtgctattgattcctctggctttttcaattgccaaaaaaaccaatacctcattgttaaagctggccattccgctgtgtaccgcattgatggcagtgcactgcgtggttcccccacatccggctgctttatatgttgccaataagcttggcgcagatatcggttcggtgatcgtctacggtttgctggttgggctgatggcatcactgatcggtggcccacttttccttaaatttctgggtcaacgactgccctttaaacctgtacccacagagtttgccgatctcaaagttcgcgatgaaaaaacactaccgtcattaggcgcaacgttattcaccatactgctacccattgcgctgatgttggttaaaacgattgccgaattgaatatggcgcgtgagagtggtttttataccttgcttgagtttattggcaaccctattactgccatgtttatcgccgtgtttgtcgcctattatgtgttgggtatacgccagcatatgagcatggggacaatgctcacacatacggaaaatggcttcggttctattgctaatattttgctgattatcggggccggaggcgcattcaacgccattttaaaaagcagcagtctcgctgatacgctggcagttattctctccaatatgcatatgcacccgattcttctggcctggttggtggcacttattctgcatgctgcagtgggctccgctacggtggcaatgatgggggcaacggcaattgttgcacccatgctgccgctgtatcccgacatcagcccggaaattattgcgattgctatcggttcaggtgcgattggctgcacgatcgttacggactcgcttttctggctggtgaagcaatattgcggcgctacgctcaatgaaacatttaaatactatacgacagcgacatttatcgcttcagtcatcgctctggcgggcacattcctgctgtcatttatcatctaa

SEQ ID NO: 384 - protein, 445 aa, Escherichia coli UTI89
MHSQIWVVSTLLISIVLIVLTIVKFKFHPFLALLLASFFVGTMMGMGPLDMVNAIESGIGGTLGFLAAVIGLGTILGKMMEVSGAAERIGLTLQRCRWLSADVIMVLVGLICGITLFVEVGVVLLIPLAFSIAKKTNTSLLKLAIPLCTALMAVHCVVPPHPAALYVANKLGADIGSVIVYGLLVGLMASLIGGPLFLKFLGQRLPFKPVPTEFADLKVRDEKTLPSLGATLFTILLPIALMLVKTIAELNMARESGFYTLLEFIGNPITAMFIAVFVAYYVLGIRQHMSMGTMLTHTENGFGSIANILLIIGAGGAFNAILKSSSLADTLAVILSNMHMHPILLAWLVALILHAAVGSATVAMMGATAIVAPMLPLYPDISPEIIAIAIGSGAIGCTIVTDSLFWLVKQYCGATLNETFKYYTTATFIASVIALAGTFLLSFII

SEQ ID NO: 385 - DNA, 1329 bp, Escherichia coli UTI89
atggaaaacgctaaaatgaactcgctcatcgcccagtatccgttggtaaaggatctggttgctcttaaagaaaccacctggtttaatcctggcacgacctcattggctgaaggtttaccttatgttggcctgaccgaacaggatgttcaggacgcccatgcgcgcttatcccgttttgcaccctatctggcaaaagcatttcctgaaactgctgctactggggggattattgaatcagaactggttgccattccggctatgcaaaaacggctggaaaaggaatatcaacaaccgatcagcgggcaactgctactgaaaaaagacagccatttgcccatttccggctccataaaagcacgcggcgggatttatgaagtcctggcacatgcagaaaaactggctctggaagcggggttgctgacgcttgaagatgactacagcaaactgctttctccggagtttaaacagttctttagccaatacagcattgctgtgggctcaaccggaaatctggggttatcaatcggcattatgagcgcccgcattggctttaaggtgacagtgcatatgtctgctgatgcccgggcatggaaaaaagcgaaactgcgcagccatggcgttacggtcgtggaatatgagcaagattatggtgttgccgtcgaggaaggacgtaaagcagcgcagtctgacccgaactgtttctttattgatgacgagaattcccgcacgttgttccttgggtattccgtcgctggccagcgtcttaaagcgcaatttgcccagcaaggtcgtatcgtcgatgctgataaccctctgtttgtctatctgccgtgtggtgttggtggtggtcctggtggcgtcgcattcggacttaaactggcgtttggcgatcatgttcactgcttttttgccgaaccaacgcactccccttgtatgttgttaggcgtccatacaggattacacgatcagatttctgttcaggatattggtatcgacaaccttaccgcagcggatggccttgcagttggtcgcgcatcgggctttgtcgggcgggcgatggagcgtctgctggatggcttctatacccttagcgatcaaaccatgtatgacatgcttggctggctggcgcaggaagaaggtattcgtcttgaaccatcggcactggcgggtatggccgggcctcagcgcgtgtgcgcatcagtaagttaccaacagatgcacggtttcagcgcagaacaactgcgtaatgccactcatctggtgtgggcgacgggaggtggaatggtgccggaagaagaaatggaacaatatctggctaaggggcactaa

SEQ ID NO: 386 - protein, 442 aa, Escherichia coli UTI89
MENAKMNSLIAQYPLVKDLVALKETTWFNPGTTSLAEGLPYVGLTEQDVQDAHARLSRFAPYLAKAFPETAATGGIIESELVAIPAMQKRLEKEYQQPISGQLLLKKDSHLPISGSIKARGGIYEVLAHAEKLALEAGLLTLEDDYSKLLSPEFKQFFSQYSIAVGSTGNLGLSIGIMSARIGFKVTVHMSADARAWKKAKLRSHGVTVVEYEQDYGVAVEEGRKAAQSDPNCFFIDDENSRTLFLGYSVAGQRLKAQFAQQGRIVDADNPLFVYLPCGVGGGPGGVAFGLKLAFGDHVHCFFAEPTHSPCMLLGVHTGLHDQISVQDIGIDNLTAADGLAVGRASGFVGRAMERLLDGFYTLSDQTMYDMLGWLAQEEGIRLEPSALAGMAGPQRVCASVSYQQMHGFSAEQLRNATHLVWATGGGMVPEEEMEQYLAKGH

SEQ ID NO: 387 - protein, 882 aa, Desulfatibacillum alkenivorans AK-01, unfinished sequence"
ATGGACTTTTTGGTACTTTTACTAGTCGGCTTCGGGGGCGGCGTGGTTGGAGCGTGCATCGGCGCTCTACCCGCATTTATTCTGACAGGCATCTTCGCCGTGATCGGGGGATTCTTCGCCATGCTGGGCCAGCCCGTCGACGTTTTGGGCCCCCTGGCCTTCGGTCCTGCGCTGGGACCTCACGTATTCTTCGTGGGCGGCGTGGCGGCCACGGCATACGCCGGCAAGAAGGGCTACATTGAAGAAGGCGGGAACATCCTGCTTTCCCTGAACGGCACCGGCGAGCCTTCCGTCATGCTGGTGGGCGGCGTCTTCGGCGTCATCGGCCTTTTGATCACCACGGGGTTATCCAAGATCGGGGTCCCTACGGATAACATCGCCGTATCCGTGTTTGCATGCGGCGTTCTGGGGCGTTTGATCTTCGGCGAAAAGGGCGTTTGCGGCATGTACAACGAAAGCGAGAAGCGCGCGTACATGTCTCTGGGCAAGCCCTTTTGGTACAACATCATCCTGGGCTTCTGCGTGGGCCTTATGTGGGCCGGCCTCGTGGCGGTAGTCAAGACCAACACCACGGCCAACATCACTCCCATCTTCGCCCTGGCCTTCGGCTTTTCGGCCATTTCCCTGATATTCACCCAGACGGGATTCGACACCCCGGCGACGCACCACATCGCCTATCCCAGCGCTCTGGCGGCGGCCATGGCCATGAACGCGGGCCTGCCTCCGGTGGGCGGCATCCTGGTGGGCGGGGCTTTTGCAGCGTTGGGCGCCCTGTTCGGAGACATGGCGATCAAAATCTTCAACACCAACTGCGACACGCATATTGACCCGCCGGCCACGGCGATCGCCCTGAATGTACTGCTTATCAACCTGGTCCTGTAG

SEQ ID NO: 388 - protein, 293 aa, Desulfatibacillum alkenivorans AK-01, unfinished sequence"
MDFLVLLLVGFGGGVVGACIGALPAFILTGIFAVIGGFFAMLGQPVDVLGPLAFGPALGPHVFFVGGVAATAYAGKKGYIEEGGNILLSLNGTGEPSVMLVGGVFGVIGLLITTGLSKIGVPTDNIAVSVFACGVLGRLIFGEKGVCGMYNESEKRAYMSLGKPFWYNIILGFCVGLMWAGLVAVVKTNTTANITPIFALAFGFSAISLIFTQTGFDTPATHHIAYPSALAAAMAMNAGLPPVGGILVGGAFAALGALFGDMAIKIFNTNCDTHIDPPATAIALNVLLINLVL

SEQ ID NO: 389 - protein, 399 aa, Desulfatibacillum alkenivorans AK-01, unfinished sequence"
ATGGCTTTAACTTTGGATGATGCCGGCTCCTGCGCGGTGCAGACCGGCGAAAACAACGCAAAGCCCCGGGAAAAGGCTCCCGGCGGCAACGAAGGAGACAACACAATGGTAGGAAAAGAAGCATTGGGAATGGTTGAGACCAGAGGCCTCGTCGCCAATATAGAGGCGGCCGACGCTATGGTTAAGGCGGCCAACGTCACCCTGATCGGCAACATCAAGATCGGTTCCGGATTGGTCACGACTATGGTTCGCGGAGACGTGGGCGCCGTCAAGGCAGCCACCGACGCCGGCGCTGCTGCAGCCGCCAAGGTTGGCGAAGTGGTGTCCGTCCATGTCATCCCCAGGCCCCATACGGAAGTGGAAGGCATTCTGCCCCAGGGCCTTGAAAGCGTCAAATAA

SEQ ID NO: 390 - protein, 132 aa, Desulfatibacillum alkenivorans AK-01, unfinished sequence"
MALTLDDAGSCAVQTGENNAKPREKAPGGNEGDNTMVGKEALGMVETRGLVANIEAADAMVKAANVTLIGNIKIGSGLVTTMVRGDVGAVKAATDAGAAAAAKVGEVVSVHVIPRPHTEVEGILPQGLESVK

SEQ ID NO: 391 - DNA, 804 bp, Desulfatibacillum alkenivorans AK-01, unfinished sequence"
atgcaggacgacattataaacgccgttatgaaagaagttatgaagagggtggaagcccccgcagcggcgcccgccgcttgcccggcggcccccacggttgctgcttgcgccgccagcggcctgaccgagtttgtgggcgtttgcgagtttggaaacacccagggcctggtcatcgccaacctggaccaagccatccatgaaatcatgggttttgacaagaaataccgttccctgggcatcatcggcgcccgcaccggagcaggcccccagatcatggcggccgacgaagccatcaaggccaccaacaccgaaatcctcaaggtggagcttccccgcgacacccagggcggtgcaggccacggatccctgatcgtgttcggcgctgaagacgtttccgacgcccgccgcgccgtggaagtcaccctggacaatctgcccaagttcttcggcgacgtgtacgccaacgacatgggccacctggaactgcaatacaccgcccgcgcctccaagtgcctcaccaccgtgttcggcgctcccgaaggcaaggctttcggcctgatccttggcgctcccgcggtcatcggcatgctcatgatcgacgcggccgtcaaatccgctgacgtagatgttttggattacggatctccggcccacggcaccagcttctccaacgaagtgttcatcaccgtgtccggcgactccggcgcagtgcgccaggccatcatcgccggccgcgaagttggcaagcctctcctggccgcctggggacaggactgcccctccgctcacatcccctacatttaa

SEQ ID NO: 392 - protein, 267 aa, Desulfatibacillum alkenivorans AK-01, unfinished sequence"
MQDDIINAVMKEVMKRVEAPAAAPAACPAAPTVAACAASGLTEFVGVCEFGNTQGLVIANLDQAIHEIMGFDKKYRSLGIIGARTGAGPQIMAADEAIKATNTEILKVELPRDTQGGAGHGSLIVFGAEDVSDARRAVEVTLDNLPKFFGDVYANDMGHLELQYTARASKCLTTVFGAPEGKAFGLILGAPAVIGMLMIDAAVKSADVDVLDYGSPAHGTSFSNEVFITVSGDSGAVRQAIIAGREVGKPLLAAWGQDCPSAHIPYI

SEQ ID NO: 393 - DNA, 1668 bp, Desulfatibacillum alkenivorans AK-01, unfinished sequence"
ttgcagaaaagacaaaagcgatttgaggtcctggaacaaagggccgtcaacaaagacggattcatcaaggaatgggctgaagtcggactcgttgccatggacagcccctacgacccgaaacccggactcaaaatagaaaacggcaaggttgtggaaatggacggaattccctgcgcggaattcgacatgatcgacaccttcatcgccaaccattgcatcgacgtgaacgtggctgccgaagccatggccattgactccctggaattcgccaagaaactggtggacatcaatgtgtccggcgctgaaatcaagcgtctggttcccggcctgaccccggccaagatcctggacatcctgaaaaaaatgaacgtggttgagctcatgatggctatgcagaaactgcgctgccgcaagacgcccgccaaccaggctcacatcaccaacgtcaaggacaccccggccctgcttgccgccgactccgccgaaggctccttccgcgggttccaggaactggaaaccaccgtcggcatcgcccgttacgcccccatgaacgccatcgccctgttgatcggcggccaggtgggatgccgcggcaccctgacccagtgcgccgtggaagaagccatggagcttcagatgggcatgaagggcctcaccgcatacgccgaaaccgtttccgtatacggcaccgatcaggtctttgttgacggcgacgacaccccgtggtccaaggctttcctggcttccgcctacgcctcccgcggcatcaaaatgcgcttcacctccggcacaggatcggaagtgcagatggggtacgccaacaaaaaatccatgctttaccttgaaatcaagtgcatcatgatcaccaagggcgccggcgtgcagggcctccagaacggctccatctcctgcatcggcgttcccggcgcagttcccggcggcatccgcgccgtcctggccgaaaacgtggctacggttctgttggacctggaagtggcttccggcaacgaccagaccttcacccactcccccatcaggaacaccgcaagaatgctcatgcagttcctgcccggcaccgactacgtgttctccgggtactccggggtgcctaactacgataacatgttcgctggctccacccacgattccgacgacttcgacgacatgctcgttttgcagcgcgacctccagtgcgacatggctctgcgcccggtgaccgaagagcagatcatcgccgtgcggaacaaggccgcccgcgccatgcaggccgtcttccaggaagtgggcttcccggcaatcaccgacgaagaagtggaagcagccacctacgcccacggctccaaggacatgcctgaccgcaatcagccggaagaccttcgcgccattgaagagttcctcaagtccggcaaaaccggcctggacattgtcagggctctgcacaagcacggcttccaggacgttgcggaatccgtattgggaatgctcaagcaaaaggtttcgggcgattatctgcacacctccgcgattgtcgacgagaacttcaacgtcaagagcgcagtgaacgaccgcaacgattacatgggacccggcaccggctaccgcctggaaggcgaacgctgggagctgcttaagaacatcccccaggccatcagccctgaagacatatag

SEQ ID NO: 394 - protein, 555 aa, Desulfatibacillum alkenivorans AK-01, unfinished sequence"
MQKRQKRFEVLEQRAVNKDGFIKEWAEVGLVAMDSPYDPKPGLKIENGKVVEMDGIPCAEFDMIDTFIANHCIDVNVAAEAMAIDSLEFAKKLVDINVSGAEIKRLVPGLTPAKILDILKKMNVVELMMAMQKLRCRKTPANQAHITNVKDTPALLAADSAEGSFRGFQELETTVGIARYAPMNAIALLIGGQVGCRGTLTQCAVEEAMELQMGMKGLTAYAETVSVYGTDQVFVDGDDTPWSKAFLASAYASRGIKMRFTSGTGSEVQMGYANKKSMLYLEIKCIMITKGAGVQGLQNGSISCIGVPGAVPGGIRAVLAENVATVLLDLEVASGNDQTFTHSPIRNTARMLMQFLPGTDYVFSGYSGVPNYDNMFAGSTHDSDDFDDMLVLQRDLQCDMALRPVTEEQIIAVRNKAARAMQAVFQEVGFPAITDEEVEAATYAHGSKDMPDRNQPEDLRAIEEFLKSGKTGLDIVRALHKHGFQDVAESVLGMLKQKVSGDYLHTSAIVDENFNVKSAVNDRNDYMGPGTGYRLEGERWELLKNIPQAISPEDI

SEQ ID NO: 395 - DNA, 645 bp, Desulfatibacillum alkenivorans AK-01, unfinished sequence"
atgaaactcacagaagagatgctaagacagatcattaccgaagtcgtgggtcagatggcgggcggcgcggccgctcctgctcccgcagcggtggatacggacaagccccttaacttcatcgaaaaagggcccgcccaggcaggaagcaaccccaaggaagtggtggttgcagtgcctcccggattcggcgtaactcccaccaagaccattattgacatcccccattccgtggtgctggccgaagtggccgcaggcatcgaggaagaaggcctaacggccaggttcgtgcggaattaccagaccgccgacgtggctttcctggcccactccgccgcccagttgagcggctccggcgttggaatcggcatcctctccaggggaacctccgtcatccatcagaaggatcttgcgcccctgcagaacctggagctcttcccccaggcccccctggttgaagctgagacgttccgggctatcggcaaaaacgccgccaaatacgccaagggtgagaaccccaatccggttcccgtgaaaaacgatcccatggccaggcccaggtaccagggtcttgcagccctgctgcacaacaaggaagtgcagtttttggacccgcaaaagaaaattcttgaagtggttcagggctaa

SEQ ID NO: 396 - protein, 214 aa, Desulfatibacillum alkenivorans AK-01, unfinished sequence"
MKLTEEMLRQIITEVVGQMAGGAAAPAPAAVDTDKPLNFIEKGPAQAGSNPKEVVVAVPPGFGVTPTKTIIDIPHSVVLAEVAAGIEEEGLTARFVRNYQTADVAFLAHSAAQLSGSGVGIGILSRGTSVIHQKDLAPLQNLELFPQAPLVEAETFRAIGKNAAKYAKGENPNPVPVKNDPMARPRYQGLAALLHNKEVQFLDPQKKILEVVQG

SEQ ID NO: 397 - DNA, 561 bp, Desulfatibacillum alkenivorans AK-01, unfinished sequence"
atggtaagttttacgaaagatcagatagcagacatcatccggaaggtcggagacggaacctcccccgaagccctggaaagcgccgtaagaaacgttttggccaagcttcagtccgaaggcctgtccgcccctgcaagccagggcggcaagctggacgccagctcctatcctctgggaatcaaacgcaaagacctggtcaagtccgccaccgggctgggcctggacgacatcaccattgaaaaggtggtctccggcgaaattcagttcgacgatatcaagacccgcccggaaaccctggcgtatcagaacgaaatcgccaagagcgtcaaccgccccaacttggccaacaacctggcccgcgccggcgaaatgacccggatccccgacgccagactgctggagatgtacaacttcctgcgcccctaccgggccgccaagcaggaaatgatctccatggccgaggaactggagcagaagtaccaggcccccgcctgcgccaaactggtgcgggaagcggccgacgtttacgagaagaacaatcgtctcaaaggagaccgctag

SEQ ID NO: 398 - protein, 186 aa, Desulfatibacillum alkenivorans AK-01, unfinished sequence"
MVSFTKDQIADIIRKVGDGTSPEALESAVRNVLAKLQSEGLSAPASQGGKLDASSYPLGIKRKDLVKSATGLGLDDITIEKVVSGEIQFDDIKTRPETLAYQNEIAKSVNRPNLANNLARAGEMTRIPDARLLEMYNFLRPYRAAKQEMISMAEELEQKYQAPACAKLVREAADVYEKNNRLKGDR

SEQ ID NO: 399 - protein, 1809 aa, Desulfatibacillum alkenivorans AK-01, unfinished sequence"
ATGCTCATTGCTGGTGTAGACATAGGGAACAACTCCACGGAAGTGGCTGTGGCGAGAATCGGCGCTGAAGTCCAATTCTTGTCCAGCGCTCTTGTGAGAACCATAGGCCTGAAAGGCACCCTGCGCAACGCCATGTGCGTCATTGACGCCGTGGACAAAGCCATGGCCGCAGTTTCCATGACCCGGAACGATCTGGATCTGATTCTGTTGAACAAGGCGACGCCCGTAATCGGAGACGTAGCCATGGAGACGATTACGGAAACCGTCATCACGGAATCGGCAATGATCGGGCATAATCCGGATACACCAGGCGGGCTGGGTCTGGGTCAGGGAGTGACCGTAGATATCCGCGACCTGACCCAGACCGCCCCCGGCGCTCCCTGCATCGTCGTCATTGACGGCGACGTGGACTTCACCCAGGCGGCTGAGATGATCAACGCAGCCGCAGCCAAGGGCGTCAAAATAACCGGCGCGATAGTAAAAAAGGACGACGGCGTTCTGATATACAACCGCCTGACCTCCCCTATCCCCATTGTGGATGAAGTTCAGCATATCGACAAAGTTCCCCTGGGCATGCCCGCGGCGCTGGAAGTGGCCCGCGTGGGCAGGTCCATCGAAAAATTGTCCAATCCATACGATATCGCCACCCTGTTTGAATTATCCCCGGAGGAAACCCGGCAGATTACCCCCATTGCCAGGGCCCTCACCGGCAACCGGTCCGGGGTGGTGATCAAGACCCCCAAGGGCGACGTCCAGGAGCGCCGGATTCCGGCCGGGACCATCACCCTGGTGGGCGAAACCGCCAAGGAGACCGTGGACGTGGAACTGGGCGCCGACGCCATCATGGAAAAGTTGGCCAGGGTGGCGCCGCTGAAGGAAATCCAGTCCCAGCCCGGCACCAACGCCCACGGCATGTTCGAACGGGTCAGAACCGTTATGGCCGAACTGACGGACCAGCCTGTAAGCCTCATCAAGATACAGGATGTGCTGGCCGTAAACACCCTCCAGCCCCAGCATGTGCTTGGCGGCCTGGCCGGGGAATTCACCCGCGGGACCGCCGTAGGCCTGGCGGCCATGGTCATGACCCAGAACATCCCCATGCAGCGTCTGGCGGCCAAGTTGAAAGAGGAAACCGGCGTGGAAGTGGAAATCGGCGGCGTGGAGGCTGAAATGGCCATCACCGGCGCCCTGACCACTCCCGGCGCCGAAGCGCCCCTGGCCATCCTGGACCTGGGCGGAGGCTCCACCGACGCCTCCATCATTCACCGGGACGGAACGGTCAAGTCCATCCACATGGCCGGCGCGGGCGACATGGTGACCATGCTCATCAACACGGAGCTTGGCCTGGACGATCCCGACCTGGCCGAGGACATCAAGCGCTATCCCCTGGCCAAGGTGGAAACCCTCTTTCACATGCGGCACGAAACCGGAGCCGTGGAGTTTTTCGACGCCCACCTGGATCCCTCCCTGTTCGGCAGGGTGGCTATCCTGGGCGAAAACGGCCCCATTCCCATCATGCACGATCTCAACCTGAACCAGATCGTAAACGTGCGCCGCAAAGCCAAGGAAAAGGTGTTTGTAAGAAACGCCTTGAGGGCTTTGGAGCAGGTGGCGCCCGGCGGCAACATCAGGCTTATCGACTTTGTGGCTCTGGTGGGCGGATCGGCCCTGGATTTTGAAATCCCGGAAATGATCGCAGACGCCCTGGCGGAGTACGGCCCTGTTTTGGGCAAGGGCAATATTCGCGGATGCGAAGGCCCCAGAAACGCCGTGGCCACCGGCCTGTGCCTTTCCAGGAAAGGATGCTGA

SEQ ID NO: 400 - protein, 602 aa, Desulfatibacillum alkenivorans AK-01, unfinished sequence"
MLIAGVDIGNNSTEVAVARIGAEVQFLSSALVRTIGLKGTLRNAMCVIDAVDKAMAAVSMTRNDLDLILLNKATPVIGDVAMETITETVITESAMIGHNPDTPGGLGLGQGVTVDIRDLTQTAPGAPCIVVIDGDVDFTQAAEMINAAAAKGVKITGAIVKKDDGVLIYNRLTSPIPIVDEVQHIDKVPLGMPAALEVARVGRSIEKLSNPYDIATLFELSPEETRQITPIARALTGNRSGVVIKTPKGDVQERRIPAGTITLVGETAKETVDVELGADAIMEKLARVAPLKEIQSQPGTNAHGMFERVRTVMAELTDQPVSLIKIQDVLAVNTLQPQHVLGGLAGEFTRGTAVGLAAMVMTQNIPMQRLAAKLKEETGVEVEIGGVEAEMAITGALTTPGAEAPLAILDLGGGSTDASIIHRDGTVKSIHMAGAGDMVTMLINTELGLDDPDLAEDIKRYPLAKVETLFHMRHETGAVEFFDAHLDPSLFGRVAILGENGPIPIMHDLNLNQIVNVRRKAKEKVFVRNALRALEQVAPGGNIRLIDFVALVGGSALDFEIPEMIADALAEYGPVLGKGNIRGCEGPRNAVATGLCLSRKGC

SEQ ID NO: 401 - DNA, 498 bp, Desulfatibacillum alkenivorans AK-01, unfinished sequence"
atgcgaaggccccagaaacgccgtggccaccggcctgtgcctttccaggaaaggatgctgatcatgggatctccgcttctgcaagtcgctcaaaaacccgccgtttacctggttgtattgggagaggcgcccgattggttcgtccaggcattggaaaacggcctggaggaggaaggaattccttgcgaaagaagggattcccaggaaaacgacgcggttttggcggccagccaggcggcgaaagcctcccggatcaacgtggggctttccgttaaagcggcggccggcggcgccattaccggagtggtgctccatcacagggatctgcctgaaaagcgccccctcttccacctgacctgggaagaggtgtccacagagtccctgaacaggctgggccggaacgcggcccggctggtcaaaggcaacccgttcatcatggacacggcggacacggccggtccatgcggggattcaggaaccaaggataaactaaattag

SEQ ID NO: 402 - protein, 165 aa, Desulfatibacillum alkenivorans AK-01, unfinished sequence"
MRRPQKRRGHRPVPFQERMLIMGSPLLQVAQKPAVYLVVLGEAPDWFVQALENGLEEEGIPCERRDSQENDAVLAASQAAKASRINVGLSVKAAAGGAITGVVLHHRDLPEKRPLFHLTWEEVSTESLNRLGRNAARLVKGNPFIMDTADTAGPCGDSGTKDKLN

SEQ ID NO: 403 - DNA, 657 bp, Desulfatibacillum alkenivorans AK-01, unfinished sequence"
atgaagaaagtaaagagcatcggccttatcgaaaccctgggcatggtgggcgtggtggaagcggcggacgccgctttgaaagccgccaacgtcacgcttttgggctacgaatttaacggggccggctacatggtcatcaagctgaccggggacgtggctgcggttaaggccgctgtcagttcaggcgctgcaaccgcccagaaacttggcaatctggtggcggcgcatgtcatcccccgtccggatgaccaggtgatcgatacggaaatatgcggaaaggacaacgtaccgccgttcaacgggtccgatagtgaacccgaagacggcaaaccctccggttcgtcgtccgaaaaggaatccaaagaaagcacggaaaccgcagtaaaagcctctgaacccaagcctgcaaccgcaactgcagacaaggaggaagcgccccttgagaaagcggcgcccgaggcgaaagacgcaaaagacacgaaagaggcgcccgccaagcaggcgtccaagcccgaagcaaaaacaaaatcctccaaacctaccgcttcggaagcaaaaaatgcgtccagccccaaaacgccggaaaagcaggcggactcgggcaagactgcgccggcgaaaacagacggcggcaataagccgaaatccaggaaatag

SEQ ID NO: 404 - protein, 218 aa, Desulfatibacillum alkenivorans AK-01, unfinished sequence"
MKKVKSIGLIETLGMVGVVEAADAALKAANVTLLGYEFNGAGYMVIKLTGDVAAVKAAVSSGAATAQKLGNLVAAHVIPRPDDQVIDTEICGKDNVPPFNGSDSEPEDGKPSGSSSEKESKESTETAVKASEPKPATATADKEEAPLEKAAPEAKDAKDTKEAPAKQASKPEAKTKSSKPTASEAKNASSPKTPEKQADSGKTAPAKTDGGNKPKSRK

SEQ ID NO: 405 - DNA, 609 bp, Desulfatibacillum alkenivorans AK-01, unfinished sequence"
ttgaattcccttcgtgcatacgcctttattgatcgcctccagccccagttggccggggtggccgctgcaagctcgccagggttcctgccgataggcggggaatcctcccttgtgatggaagtgcagcccggcatcctgatcaaccaagccattgacctggcgcttaaggccagtccggtcaaactggggaaatccctttgcgagcggtatttcggatacatggagatccatgccaagtctcagcaggacgtgctttatgcaggcagcgcagcattgaaggggcttggttttacggaaaaagacataaccaagccggaaatcttgagttccctgatcattaacaaggtcagcccgtaccacgcccagttgatgaacgtttaccgaaacgggtctttgctgattccgggcaaggacctgctcaccgtggaatgcgagcccgccgcgtacatctttttggccgccaatgaagtggaaaaacaggtggacgtcaccctggtggattgcgtggaagtcggggctgtggggcggttgtccgtatccggaacgccctccgagattaaacaggcggagaaagcggccattcaggctttaaaggcggtgcagccatga

SEQ ID NO: 406 - protein, 202 aa, Desulfatibacillum alkenivorans AK-01, unfinished sequence"
MNSLRAYAFIDRLQPQLAGVAAASSPGFLPIGGESSLVMEVQPGILINQAIDLALKASPVKLGKSLCERYFGYMEIHAKSQQDVLYAGSAALKGLGFTEKDITKPEILSSLIINKVSPYHAQLMNVYRNGSLLIPGKDLLTVECEPAAYIFLAANEVEKQVDVTLVDCVEVGAVGRLSVSGTPSEIKQAEKAAIQALKAVQP

SEQ ID NO: 407 - DNA, 864 bp, Desulfatibacillum alkenivorans AK-01, unfinished sequence"
atgaaagacgcaaacatggaagccatcaacgaaagaataaggcagtttcgcgacagcctttccctggaaaacgcgccccgcccgggcagccccctctgggcaggtgtggacctgggaaccgccaacatcgtcaccgccgtggtggaccgggacggaacgcctgtggcaggcatgaccacccgctccaagtcaacggttcgggacggtctggtcttcgattacatgggcgttatgagcattctcaagacccatgtgcaggttttgcgctccaggggctttgacatcagggacgcggcagccgcctaccctcccggcaccatgggcagaaaccgccaggccttcggccacattttaaacggcgccgacctggaagccgtcagcctggtggacgaacccagcgcggccgcactggctttaggcattgactcaggttgcgtggtggatatcggcggcggcaccacgggcatctccattttggaaaacggagaggtggtttacaccggcgacgagcccaccggcgggcatcatctggacttggtcatcgcgggcagcatgggcatttccattgaagaagccgaagccatgaaaaacaacccggcccatcagcgcatgctggcgggaatggtcatgccggtctttgagaaaatgggcgccatagtccgggagcacacagcatcctataaaccgaaacaaatctatttagtgggcggaacttccagcttccccggagcggacgaagttatcgccaaagaaacgggcctgcccgtctttttgcctgacgatcccctattagtcacccccctgggcacggcgctccatgcggcgctggcagctccaggaagaaaggcggcggcaaatgaataa

SEQ ID NO: 408 - protein, 287 aa, Desulfatibacillum alkenivorans AK-01, unfinished sequence"
MKDANMEAINERIRQFRDSLSLENAPRPGSPLWAGVDLGTANIVTAVVDRDGTPVAGMTTRSKSTVRDGLVFDYMGVMSILKTHVQVLRSRGFDIRDAAAAYPPGTMGRNRQAFGHILNGADLEAVSLVDEPSAAALALGIDSGCVVDIGGGTTGISILENGEVVYTGDEPTGGHHLDLVIAGSMGISIEEAEAMKNNPAHQRMLAGMVMPVFEKMGAIVREHTASYKPKQIYLVGGTSSFPGADEVIAKETGLPVFLPDDPLLVTPLGTALHAALAAPGRKAAANE

SEQ ID NO: 409 - DNA, 900 bp, Desulfatibacillum alkenivorans AK-01, unfinished sequence"
atgcggcgctggcagctccaggaagaaaggcggcggcaaatgaataaagataataataccctggattacaatacagttcaaattaaggcactcgttcagcaggtgctctacgctgtggccagggccagccgtgacgaagatgcggaccgttatgtgctggccctgttcacgggcgctaccgctggattttcacaggccttgtccgggctggaacacctcatgcttaacgggaccatgcttcgcgtcctgacaagcgagtcggcatgccgcctttacggagacgtattgaaaaaaaggctcatgccctggcctaacgcggaagtcatggaaaaagactcctggttcagccaggtgcaaaaatgctccggcgtggtcattcccatgctgagcgtggcctccctttcccgcgtttgcagcctggccccggacaccttggccgcgaatataattcttcaggccctattcatgggtaagccagtcgtggcggccattgacggcgccgcgccaaactcacctgaccgtaaactcatagggcttgatcagggcgcgccggccctgatggaggctttggcccaccgcctgcttgagttctccaatttcggcgcaagactgacctggagccgagatctcggccccgcttccctgcgtttcttccgccccgcagatagcgaccaacccggtcagtcgccccttaacatcccggcgtcccggccctcggccccccaaagtcccgccccccctgactttggcccgatccggctggtggacgccgggcatgttaagcaagctcgcgtagcaggaacgcctattcatacgacgcctggcgccgtggttacccctcttgccagggaaatggcctctggctgggggatagagatcatcgccgcaccccggggttaa

SEQ ID NO: 410 - protein, 299 aa, Desulfatibacillum alkenivorans AK-01, unfinished sequence"
MRRWQLQEERRRQMNKDNNTLDYNTVQIKALVQQVLYAVARASRDEDADRYVLALFTGATAGFSQALSGLEHLMLNGTMLRVLTSESACRLYGDVLKKRLMPWPNAEVMEKDSWFSQVQKCSGVVIPMLSVASLSRVCSLAPDTLAANIILQALFMGKPVVAAIDGAAPNSPDRKLIGLDQGAPALMEALAHRLLEFSNFGARLTWSRDLGPASLRFFRPADSDQPGQSPLNIPASRPSAPQSPAPPDFGPIRLVDAGHVKQARVAGTPIHTTPGAVVTPLAREMASGWGIEIIAAPRG

SEQ ID NO: 411 - DNA, 870 bp, Desulfatibacillum alkenivorans AK-01, unfinished sequence"
atggaaaggacagatcatgattttaggacaagtcataggaacggtagtggccacgagcaagcacgagctgctggtgggctcgaaaatactggtggttcaggccgtaaaacccgatgggactcctatagaaggcgaacaactggtggcagtggatacggtgggcgccggaaccggcgagcacgtgattgtgacgacgggctccaatgcgtccaaagcgtgcgagacggagaaggcgcccgtggacgcagccattatcggcatcatcgacgaaatcgacgtgaactgaggagagaggccatgagcatttacaccggcggaggcgataaaggcaaaaccagcctgctttccggagaacgggtttccaaggctgatccccgggtggaagcctatggaactctggacgaactcacggcccaattgggagtgtgccgcgcccagcttaatcagttccccgcatgcgctccttttgccgggatgatcgtgaatattcagcgcgacctgttccgggtgggcatgcagctttccagcagccccaaatactggagcaaactgtccgcccccattaatagcgacgacatccaatccctggaacaggccattgatgctttggaaaaggctttcgggcttcccggattttttgtgagtccgggcagaacgttggccggcgcatctctgcatgtagcccggaccatctgccgccgcgcagagcgccaggcatgggccgccgcaggagacgttgaaagctacgcactgattttaaaatacatcaaccggttgtccgaccttttgttctccctttcgtggactgcggaaatacggattttgcttactgaggagttgagccatggaaatcatgacgcacatctgtaa

SEQ ID NO: 412 - protein, 289 aa, Desulfatibacillum alkenivorans AK-01, unfinished sequence"
MERTDHDFRTSHRNGSGHEQARAAGGLENTGGSGRKTRWDSYRRRTTGGSGYGGRRNRRARDCDDGLQCVQSVRDGEGARGRSHYRHHRRNRRELRREAMSIYTGGGDKGKTSLLSGERVSKADPRVEAYGTLDELTAQLGVCRAQLNQFPACAPFAGMIVNIQRDLFRVGMQLSSSPKYWSKLSAPINSDDIQSLEQAIDALEKAFGLPGFFVSPGRTLAGASLHVARTICRRAERQAWAAAGDVESYALILKYINRLSDLLFSLSWTAEIRILLTEELSHGNHDAHL

SEQ ID NO: 413 - protein, 558 aa, Desulfatibacillum alkenivorans AK-01, unfinished sequence"
ATGGAAATCATGACGCACATCTGTAACGACCTGGCTCGCGTGCTGGCCCGCATCGCCCGGAAAAAAGCCCTGGAAATTCAAGTTCCCATGGTCATCGCCTTTGCGGACGCCAGGGGGGAGCTGGTTCACTTCCAGCGCATGGACAAGGCATTGCCCGTCAGCTCGGACATTGCGGTGAACAAGGCTTTTACCGCCGCTGCGCTTCGCATGTCCACCCACAAAGTGGGCAGGCTGGTGGAGCAAGGCCAGGAGCTTGCCGGTCTGGAACTGACCAACAAGGGCAAGATGGTCATTTTCGGCGGCGGCCTGCCTTTGAGCCTGGACGGAGAGGTTGTCGGATCCGTTGGAGTGAGCGGAGGATCCGTGGCCCAGGACATGGTGGTTGCCCAGGCGGCGGCCAACGCATTGGAGCAAATGGAAAAAACGGCCCAGGCTTTATTGCCGATTCTTCCCAAAACCCTGGAGGATCTCACGGATCTCGCCAATAAAATCCAGGATCTGGGGCGCAAGGAAGGCGCGGATTCGGACATCCTGGAAGGGGCCTTTTACCTGATATAA

SEQ ID NO: 414 - protein, 185 aa, Desulfatibacillum alkenivorans AK-01, unfinished sequence"
MEIMTHICNDLARVLARIARKKALEIQVPMVIAFADARGELVHFQRMDKALPVSSDIAVNKAFTAAALRMSTHKVGRLVEQGQELAGLELTNKGKMVIFGGGLPLSLDGEVVGSVGVSGGSVAQDMVVAQAAANALEQMEKTAQALLPILPKTLEDLTDLANKIQDLGRKEGADSDILEGAFYLI

SEQ ID NO: 415 - protein, 1407 aa, Desulfatibacillum alkenivorans AK-01, unfinished sequence"
ATGAGCGTGAAAGAATTTGCACTGGAAGACATGGTCGCCAGCGTGATCATGGAAATGATGAACAAGGACGACGATTCCTGCCAGCCCACGGGCGACGGGATTTACGAAACCATTGACGAAGCCGTGGCCAAGGCGAAAGCAGCCCAGCCGCGTTTGATCTCCCTTTCGCTTGAAAAGCGGGAAGCCATTCTCACGGCCATTCGGAAAATTTCCCTGGAAAAAAATGAGGAATGGGCCAAGGCGACCGTGGCGGAAACCGGCCTGGGCCGCGTGGAAGACAAAATCGCGGAAAACATCCTGGCGGCAACCAAGACGCCCGGAACCGAAGACCTGGACGCCAAGGCGCTCTCCGGCGACGCAGGCCTGACCCTCATCGAGTACGCTCCTTTCGGCGTGATCGGCTCCTTGACTCCCGTCACCAACGCCACCGGCACCCTGATCAACAACACTATTTCCATGCTGGCAGGCGGCAACACGGTGGTTTACAACGTGCATCCCTCCGCGCTCAAAATCAGCACCGAAGTCATCCGCACCTTTCATAAGGTGATCGTGGAAAACGGCGGCCCCGAGGGCTGCGTGGGCATGGTTGCCACGCCGACCATGGAAACCGCAGGCGAAATCATGGCGCATCCCGACATCAACGTGCTGGTCGCCACGGGCGGCGCGGGCGTTGTGAAGGCGGTTCTTTCCTCGGGCAAAAAAGCAATCGGCGCAGGCGCGGGCAATCCTCCGGTGCTGGTGGACGAAACCGCGTGCATCCGCAAGGCTGCGGAAGAAATCATCGCCGGCCATTCCATCAACAACAACATCTTCTGCATTTCCGAAAAGGAAGTCATCGCCGTGGATGAGGTGGCCGACAACCTTTTGAAGTTCATGGAAGAGACGGGCAAGGCCGCAATCCTGACTCCCGAGGAAGCGCAAAAGGTCACCGAAACCGTGATCCATGACAATCATGTGGTCAAAGACTACGTGGGCAAAAACGCGTCCGTGATTATCGAAGGCGCAGGCTTAACCCGCCTAGCTGGCAAGAAAGACCTTCGGTGCCTGGTGTTCGAGGCGGACTGCAAACATCCCATGGTCTGGATTGAGCAGATGATGCCCGTGCTGCCCATGGTTCGCGTCAAGGATGTATGGGAAGGCATTGACCTGGCCGTGAAAGTGGAGCAGGGCAACCGGCACACCGCCATGATGCACTCCACCAACGTGGAGCACCTGACCGCTTTGGCCCGCGCCATCCAAACCACCATTTTCGTGAAGAACGGCCCCTCTTACAGCGGCATCGGCCTGAACGGCGAAGGCCATGCAACCTTCACCATCGCCGGTCCCACAGGGGAAGGCATTACATCGGCCAAGTCCTTCTGCCGTCAACGGCGGTGCGTGCTCATCGACTCCTTTAGAATCGTTTAA

SEQ ID NO: 416 - protein, 468 aa, Desulfatibacillum alkenivorans AK-01, unfinished sequence"
MSVKEFALEDMVASVIMEMMNKDDDSCQPTGDGIYETIDEAVAKAKAAQPRLISLSLEKREAILTAIRKISLEKNEEWAKATVAETGLGRVEDKIAENILAATKTPGTEDLDAKALSGDAGLTLIEYAPFGVIGSLTPVTNATGTLINNTISMLAGGNTVVYNVHPSALKISTEVIRTFHKVIVENGGPEGCVGMVATPTMETAGEIMAHPDINVLVATGGAGVVKAVLSSGKKAIGAGAGNPPVLVDETACIRKAAEEIIAGHSINNNIFCISEKEVIAVDEVADNLLKFMEETGKAAILTPEEAQKVTETVIHDNHVVKDYVGKNASVIIEGAGLTRLAGKKDLRCLVFEADCKHPMVWIEQMMPVLPMVRVKDVWEGIDLAVKVEQGNRHTAMMHSTNVEHLTALARAIQTTIFVKNGPSYSGIGLNGEGHATFTIAGPTGEGITSAKSFCRQRRCVLIDSFRIV

SEQ ID NO: 417 - DNA, 1347 bp, Desulfatibacillum alkenivorans AK-01, unfinished sequence"
atgacgcatccgcttgtagaaaaaaccagggccgcaggcgttgtcggcgccggcggggccgggtttccaacccacgtaaagatagacgccaaggccgacaccgtgctgatcaacggcgcatcctgcgagcccctgctctgttcggacatccacttgatggaaacccgttcggacgacatcatcaaaggcctgggactggtcatggatgcggtgggcgctgaaaagggcatgatcggcatcaaggccaagcatcagaacgccgttgcgattttggagcagaaggtcgccgacgcaggcctcaccggcggccgcaacatatccgtcttcaagatgaaggacttctaccccggcggcgacgagcacgtgctggtgaacgaagccaccggccgcatcgtgccccaggggggaattcccctggaagtcggggtggtggtttccaactccgagtccgtgttcaacatgtcccaggctatggaagacaagcccgtcactcaccggaccctgaacgtggccggggaggtcatgaagcccattgtggtgcgggttcctgtgggaactcccgtctcccacgtgctgaagctggccgggggcgtgcgcaggccggacggcaaggtgatcgacggcggccccatgatgggccgggtgctggacgatccggaaaaagcctttgtgaccaaaaccacctcgggccttatcgtgctgccggcggagcacaacgtcatccgcggcaaggtgacggacatcaaccagttaatgcgcgtaacccgcctggcctgctgccagtgctccctgtgcacggatctttgcccccgattccagttgggccacaacctgcatcctcacttgatcatgcgctccctggccttgcccgtggatcatccgatcaagcagcaggctctcctatgctctgagtgcggcatttgcgaaaaatgggcctgccccatgcagatttccccccgggaagttaaccgggccatcaagcagcaacttaaaatccggcccaaggacgtgggcggcgaagatcttggccgccacccttatacggattaccgccgcgtgccggtcaagcgcctgctgggcaagctggatctgctggcttacgacgttcatcccgagcccgtgatcgatccggctcagcccggcgtggtgggcctgtatttgcgccagcacatcggcgcgccctccacgcccgtggtttcggtgggcgacgcagtggcctgcggccaggtagtagctgaaattcccgaaaaagcgctcggcgctcgcatccacgcttcgatctccggcaaagtcatagccgtggattctgaaaagattcttgtgaaaaaggagaatggcaatgtttaa

SEQ ID NO: 418 - protein, 448 aa, Desulfatibacillum alkenivorans AK-01, unfinished sequence"
MTHPLVEKTRAAGVVGAGGAGFPTHVKIDAKADTVLINGASCEPLLCSDIHLMETRSDDIIKGLGLVMDAVGAEKGMIGIKAKHQNAVAILEQKVADAGLTGGRNISVFKMKDFYPGGDEHVLVNEATGRIVPQGGIPLEVGVVVSNSESVFNMSQAMEDKPVTHRTLNVAGEVMKPIVVRVPVGTPVSHVLKLAGGVRRPDGKVIDGGPMMGRVLDDPEKAFVTKTTSGLIVLPAEHNVIRGKVTDINQLMRVTRLACCQCSLCTDLCPRFQLGHNLHPHLIMRSLALPVDHPIKQQALLCSECGICEKWACPMQISPREVNRAIKQQLKIRPKDVGGEDLGRHPYTDYRRVPVKRLLGKLDLLAYDVHPEPVIDPAQPGVVGLYLRQHIGAPSTPVVSVGDAVACGQVVAEIPEKALGARIHASISGKVIAVDSEKILVKKENGNV

SEQ ID NO: 419 - DNA, 552 bp, Desulfatibacillum alkenivorans AK-01, unfinished sequence"
atgtttaagtcaatggggctcgtggagctgaacagcgtggcccgcgggataatgaccgctgatgatatggtcaaagaggccaacgtggagctggtcctggcccgtcccgtctgcccggggcgctacctgatcatggtggccggagacacggcggcggtcaagcggtccgtggaaaaaggcctgcgcatcgccgacgagtttatcgccgatcatttcgtcctcacccacatccacccggacgtattcccggcaatcagttcattcgtcatcgtgccggaaatccgcgccatcggcgtgatcgaaacctactcctcctcctcggccgtcatggcggcggataaggcggtcaaagccgccaacgtgaacctgattgacatccgtctggccaccggcctggccggcaaggccgtggtgacgctcaccggccgcatcggatcggtgcaggccgccgtggaagccggaagccagtgtcttgcggaatccgggcttttgctgggcaatgcgattctttcctctcccggcgaggaaatcaaaaaacagattttaatgtag

SEQ ID NO: 420 - protein, 183 aa, Desulfatibacillum alkenivorans AK-01, unfinished sequence"
MFKSMGLVELNSVARGIMTADDMVKEANVELVLARPVCPGRYLIMVAGDTAAVKRSVEKGLRIADEFIADHFVLTHIHPDVFPAISSFVIVPEIRAIGVIETYSSSSAVMAADKAVKAANVNLIDIRLATGLAGKAVVTLTGRIGSVQAAVEAGSQCLAESGLLLGNAILSSPGEEIKKQILM

SEQ ID NO: 421 - DNA, 252 bp, Desulfatibacillum alkenivorans AK-01, unfinished sequence"
atgattgatcttgacaaattagtggacgaacagcttaacgggatgctttccgcgcccgacgcagtcaaacccgtcatcgtgtttcccgaagccaacgatccgagaatcatctcggcggcttccggcctgattaaccaggccagggtggtgctggtcggcgaggcggcggaaatccgctccctgtgcgattataaaagcgcggagctttattgcccccgggacaagcttttttctcccaggtgcaaattgtga

SEQ ID NO: 422 - protein, 83 aa, Desulfatibacillum alkenivorans AK-01, unfinished sequence"
MIDLDKLVDEQLNGMLSAPDAVKPVIVFPEANDPRIISAASGLINQARVVLVGEAAEIRSLCDYKSAELYCPRDKLFSPRCKL

SEQ ID NO: 423 - DNA, 1368 bp, Desulfatibacillum alkenivorans AK-01, unfinished sequence"
gtggccgtgtcccgggaagccgcccaggtgaagctgaagaacaggctggacgagttcgaaagcgcgggcaaggcaaacgtgctcatcgtccccagcctggacgaaggcaacatgctgtaccacctgttcaacacccagtatcccgaggctcaaagctccctgatcatgggcggcatggacggccaggtcctggactattccagggggtccagcttgctgcaggtgatccgcggggccaagctgcttttgctcactagaattaaagcaacaaagcctttggtgcggacttcgccgctcttccccagccccagaatcgtgaccatcaatcccggatccgtatccacccaagtggcggtgtttgacggcgacgccccggtgttgaacgtggtgatcgagcatgacaagtcgggcgcgtgcgctggcgggtccatagcccagcaggccgaatcccggctggcgtcggtgcggcgcacgttggaaaagcacgacatcgacccgtgcggcgcggccatgatcatgtcccggggcggcatgctgcccaatccccaggcggggacctatcggattagccaggccatgctcacagcattggaaagcggcgccgtggaggatcatccctccaacctgggcgctttcatggcctgggagctttccaggcagggaaaaaccccggcctttatcgtggattgccccaccatcgacgagttgacgcctgaaaaccgtctgaccggcatcaagggcatcgaaaaaatgccaatctggcacgccttgtcccagcgtcaggccgcccggatgtatgcggatctggccaaccaacgggtgcaggacctcaacctgatcgtggcccatttaggttcgggggtatccatcgggagccatgccaaaggcaaatgcatcaacgtggaaaacgccattttcgacggtcccatgggaccgtccagggcgggcgatatcccggcggaagccgtgatcgaactttgctacgccggccttgaaaaagccatggtgaaaaaaatcttcagcgccgtgggcggactgtacagtcacctgggagcgcacgatctgcggcagattcaggatcgggcgaacgacccggacgtggccgccgtcctgagcgccatggcgtccggcattgcgtcgcagattctggcgcggctgtcggatttttatcccgagcctgtggagcagatcgtattgaccggcaggatgtgcctttctccggtgttgttggaaaaggttctggaaaaactgaccctggccggcgttggcgtgaccgtgttccccggctccgtggaagcggaggccctgaaagacgccgccatgcgggtgtacaaagacatcgacgtccccatgcggtgggagtcgtag

SEQ ID NO: 424 - protein, 455 aa, Desulfatibacillum alkenivorans AK-01, unfinished sequence"
MAVSREAAQVKLKNRLDEFESAGKANVLIVPSLDEGNMLYHLFNTQYPEAQSSLIMGGMDGQVLDYSRGSSLLQVIRGAKLLLLTRIKATKPLVRTSPLFPSPRIVTINPGSVSTQVAVFDGDAPVLNVVIEHDKSGACAGGSIAQQAESRLASVRRTLEKHDIDPCGAAMIMSRGGMLPNPQAGTYRISQAMLTALESGAVEDHPSNLGAFMAWELSRQGKTPAFIVDCPTIDELTPENRLTGIKGIEKMPIWHALSQRQAARMYADLANQRVQDLNLIVAHLGSGVSIGSHAKGKCINVENAIFDGPMGPSRAGDIPAEAVIELCYAGLEKAMVKKIFSAVGGLYSHLGAHDLRQIQDRANDPDVAAVLSAMASGIASQILARLSDFYPEPVEQIVLTGRMCLSPVLLEKVLEKLTLAGVGVTVFPGSVEAEALKDAAMRVYKDIDVPMRWES

SEQ ID NO: 425 - DNA, 1206 bp, Desulfatibacillum alkenivorans AK-01, unfinished sequence"
atgaaaatattagtcatcaattcagggagttcatcccttaaatacaagctgtttgacatgaccgactcccgggtgatctgcgcggggcttgcagaacgcatcggcggggacggcgcttgcctgacccataccgtgtatcccgggaccgacgcgcaagaaaaaaaccggtttgaagagccttttgacacgcacaccaaagccatcgacaaagtggcggctcttttgatggaaggggaccaacctttggtcagctctccgcaggatctggcggccattggccatcgggtggcccagggcggcgagaccttcaaggaaaactgcgtggtggatcaaagcgtgatcgacggcattcgcgagaacatcgtcctggcgcctttgcataacccggcgaatctggcaggcatcgaagccgccatggagcgcttcccctcggttccttcggtggccgtgttcgacactcaattttccaaggatctgcccgattacgcttaccgctacgccgtgccccaatccttttatgcggattacaaggtgaggcgctacggcttccacggcacctcccaccggttcgtcacccggcagttggcctgccttatgggcaagcccatggaggccatgaacaacatcgtgtgccatctgggcaacgggagttccatgaccgccgtagaaggaggcgtgtgccgggaaacctccatgggcatgacccccacggccgggctcatcatgggcacccggtgcggcgacattgaccccgccctgccctgctatctttcggattgcacgggcagatccgtgaaggaaatccaatccattttggatcgggaaagcgggctttccggaatttgcggcatgaacgacatgcgcgacatccataaggccatcgaaaaaggaaacgacgacgccaggctggccctggacatgctctgctacagcatcaaaaagtacatcggctcgtattacgccgtgctgggcaggctggacgccatcgccttcaccgccggcatcggggagaacgactttgccgtccgcgaaaaaagtctggaaggcctggagcccatgggcattgtgctggatcgcgaagccaacgcagccctgaaaggcaaaaccggccggatcagcgtcccggacagcccggtccaggtttgggttgtgccgaccaacgaagagctggaaatcgccaacgcctgcaaggcattggcggcttaa

SEQ ID NO: 426 - protein, 401 aa, Desulfatibacillum alkenivorans AK-01, unfinished sequence"
MKILVINSGSSSLKYKLFDMTDSRVICAGLAERIGGDGACLTHTVYPGTDAQEKNRFEEPFDTHTKAIDKVAALLMEGDQPLVSSPQDLAAIGHRVAQGGETFKENCVVDQSVIDGIRENIVLAPLHNPANLAGIEAAMERFPSVPSVAVFDTQFSKDLPDYAYRYAVPQSFYADYKVRRYGFHGTSHRFVTRQLACLMGKPMEAMNNIVCHLGNGSSMTAVEGGVCRETSMGMTPTAGLIMGTRCGDIDPALPCYLSDCTGRSVKEIQSILDRESGLSGICGMNDMRDIHKAIEKGNDDARLALDMLCYSIKKYIGSYYAVLGRLDAIAFTAGIGENDFAVREKSLEGLEPMGIVLDREANAALKGKTGRISVPDSPVQVWVVPTNEELEIANACKALAA

SEQ ID NO: 427 - DNA, 375 bp, Desulfatibacillum alkenivorans AK-01, unfinished sequence"
atgccaagaagtcgtcattacaataatatccatattccccatggcagggccaacgctctggtcctgccatcggtcatggccttcaacctgaaaaaccaaggcctaacccgccgttacgccgacctcgccggaatgctgggccttgggtttgacgatccccaacgttcggcagccgcgctcgttgcggccgtcgaggcctttaaggtgcgcctgggtctcccttcctgcctccaggacctgggcgttgcacgcgaacaggttgaacaagccatgccccgaatcgtggaagacgcctttaacgactactgcaccccttctcatccttttaccgttacccgggatgatgtcgcggcaatcgttaaggagctcatctaa

SEQ ID NO: 428 - protein, 124 aa, Desulfatibacillum alkenivorans AK-01, unfinished sequence"
MPRSRHYNNIHIPHGRANALVLPSVMAFNLKNQGLTRRYADLAGMLGLGFDDPQRSAAALVAAVEAFKVRLGLPSCLQDLGVAREQVEQAMPRIVEDAFNDYCTPSHPFTVTRDDVAAIVKELI

SEQ ID NO: 429 - DNA, 1128 bp, Desulfatibacillum alkenivorans AK-01, unfinished sequence"
atgaagccaatgattgaaaatttacatataaaaaattttcgtgcatttagaaatatttcaattgaaggtctcggccgggtgaacctgatcaccggaatgaacaacacgggaaagtcgtccctgattgaagcgatccggattctgtcttctgactcgccaatatccatgatctccaatattcttgacttacgagaggtgattgcaaaaggaagagacccccagagcgattcttctgattttcaggatgagtttttgctctccagcctattcatgggatttccagagttttcagacaaagtgcaaccgattgaaatagaatctacaggaaatgaacataatttaaagctatctataaaaccggagtggttcacggaagaaccaacgcaggacggggtcggaactttggttgctgcacgtagcagttcatttgccaaagattatggggtcattcctggcgtcgaaatctccacattgaatggcatacgttacctttctctacaaagaattcaacgaagtctataccgtccgattctccgccccgtaatgttagatgacgttccttttccttgtatttatgtaagtccatatggtggggaaaaaacctcgacgcttggccctctttgggacaaaattgctctttccgaccttgaaaaggatattgtttccgctcttcaaattgtggacaaacggattaaggctgtttccatgattggcggagagggaagacaaagccaacgaaaagcgattgttcgtgtagacggccttatatctccggttccgttgcgttcgttcggcgacggtttgaaccgcctttttggaatcgtgctgtcattggtcaacgcccggggaggcatgctgctgatcgatgagtttgagaatggaatgcactacagcgtgcaagaggatgtatggcgtgccatttttaaattatccacgcagcttgatgtgcaggtaattgcaacttcccatagttgggatgcgataaaagcattccagaaggtcgccaatgaagatcccgaagaaggagtcttgattaaactgtcccgaaaaggcgacgagattataccaaccatttttaatgaaaacgaattgcttatagccacccaaaaccaaattgaggtgcgataa

SEQ ID NO: 430 - protein, 375 aa, Desulfatibacillum alkenivorans AK-01, unfinished sequence"
MKPMIENLHIKNFRAFRNISIEGLGRVNLITGMNNTGKSSLIEAIRILSSDSPISMISNILDLREVIAKGRDPQSDSSDFQDEFLLSSLFMGFPEFSDKVQPIEIESTGNEHNLKLSIKPEWFTEEPTQDGVGTLVAARSSSFAKDYGVIPGVEISTLNGIRYLSLQRIQRSLYRPILRPVMLDDVPFPCIYVSPYGGEKTSTLGPLWDKIALSDLEKDIVSALQIVDKRIKAVSMIGGEGRQSQRKAIVRVDGLISPVPLRSFGDGLNRLFGIVLSLVNARGGMLLIDEFENGMHYSVQEDVWRAIFKLSTQLDVQVIATSHSWDAIKAFQKVANEDPEEGVLIKLSRKGDEIIPTIFNENELLIATQNQIEVR

SEQ ID NO: 431 - DNA, 648 bp, Desulfatibacillum alkenivorans AK-01, unfinished sequence"
ttgaggtgcgataaaatgccgtcaaaaaagactctttgggttgaaggcgtcgatgatgaacatgttatcaagcacctttgcggaacaaaaaatggaccaaagttagaccgaatcaagcaacattgcggtatagacgcactacaagaactattgcctgttgaactgaaagcatgcgacgagggagatatagtagcagtcattgttgatgccgacacggatataggcgctcgatggcaagcaattcgaaaccgactcgatttggcggggtacgataacttacccgcccttccggatcctcaaggaactattttggaccctcctgatgacaaattgcttccaagaataggcctgtggattatgcccaataaccaaatcgacggaatcctggaagatttcctggcttttctcattccgccggactcgcagctatatgaacacgtaataaaaagcatagagggcattcctgacgaggaacaaaggttctctgcaataagagaacccaaggcaagaatccatacatggcttgcatggcaggaggagccagggtatccctatggaaaagcaataacagcgaaatttctggaacccggcgttaaggaagccgacgaactgattgactggttgaatagagtttttacccctgaatga

SEQ ID NO: 432 - protein, 215 aa, Desulfatibacillum alkenivorans AK-01, unfinished sequence"
MRCDKMPSKKTLWVEGVDDEHVIKHLCGTKNGPKLDRIKQHCGIDALQELLPVELKACDEGDIVAVIVDADTDIGARWQAIRNRLDLAGYDNLPALPDPQGTILDPPDDKLLPRIGLWIMPNNQIDGILEDFLAFLIPPDSQLYEHVIKSIEGIPDEEQRFSAIREPKARIHTWLAWQEEPGYPYGKAITAKFLEPGVKEADELIDWLNRVFTPE

SEQ ID NO: 433 - DNA, 396 bp, Desulfatibacillum alkenivorans AK-01, unfinished sequence"
atgcagggattggcgattcgctggcttgttctgactatttccatcatcatggtgtcctacttactggacggcattcacgtgagcggatttttttccgccttttttgcggccgcggttctttcggccctgaacgcatttttccgccctattctgcttatactcaccctgcccatcaacgtgctcagcctgggcctgtttaccctggtcatcaacgcggccatgctcaaaatggcccagggcgtgatccccgggtttgaagtggtgggattctggacctcggtgttcggcgccttgctcatcagcattgcaagctgggccatgaattcgctaatcagcggccagggaaacgtgcgggtgatccgcatggataatcggagagggaaattctgggattaa

SEQ ID NO: 434 - protein, 131 aa, Desulfatibacillum alkenivorans AK-01, unfinished sequence"
MQGLAIRWLVLTISIIMVSYLLDGIHVSGFFSAFFAAAVLSALNAFFRPILLILTLPINVLSLGLFTLVINAAMLKMAQGVIPGFEVVGFWTSVFGALLISIASWAMNSLISGQGNVRVIRMDNRRGKFWD

SEQ ID NO: 435 - DNA, 687 bp, Desulfatibacillum alkenivorans AK-01, unfinished sequence"
atgaagatttccatccccggtaaaaacaaaaaatgcagcaaagaccgctggcgcggcgagggatccaaaggggccgccacccgcaagatgatcatcgcggcgggccgccgcgtgttccgctcccacccctatcaggcggccagctttcggatgatcgcccaggaagggggattcagcttcaccctcatcaatcattatttcaccaaagccgaattgttcgagtccgtggtggaagaggtcatggaagagcttctggccgcctccaaaacctggatggaaggcctggacgccatgcccgcggaaaaaggcctgtccctgtttctggaccgggtcctggcctacctgttcaacaaacccgaccccgtgctgctgctcatgcaaaacgtggccgaaggggacaaggacggcgaaatccctggattcgaccggttttccgcctatgtgtcggaagccaaggacatgattatccgggtggcgcccggcgagtacgattcggagcaggccgtgtggtgggtgtacagcatgatcaatttgatgatcgtgtatatcggcgcgtcgtcctatcacgccaaggttctgggcgtggcgccccgcagcccggaatataggaattggatcaagcaaagcctcatgtatttgtttttgccccgcctggaaagaagcgttaaatcaaaaaaactccaataa

SEQ ID NO: 436 - protein, 228 aa, Desulfatibacillum alkenivorans AK-01, unfinished sequence"
MKISIPGKNKKCSKDRWRGEGSKGAATRKMIIAAGRRVFRSHPYQAASFRMIAQEGGFSFTLINHYFTKAELFESVVEEVMEELLAASKTWMEGLDAMPAEKGLSLFLDRVLAYLFNKPDPVLLLMQNVAEGDKDGEIPGFDRFSAYVSEAKDMIIRVAPGEYDSEQAVWWVYSMINLMIVYIGASSYHAKVLGVAPRSPEYRNWIKQSLMYLFLPRLERSVKSKKLQ

SEQ ID NO: 437 - DNA, 903 bp, Clostridium kluyveri DSM 555
atggctaaagtgaaagtaagaataccagctactactgcaaatatgggaccgggatttgatactttgggtatggccttaaagttatataatgaaattgaagtggaagaaataaatggaaaaacacaaatatataataatggattaaaatctgaagaggattttggaaacaatcttatatataaaagtataatagaaaccatgaataaaggaggatattcttataaaggatttaaaattaatgtagttaagtgtgatgtacctatctctagaggacttggaagtagttccgcttgtatagttggaggtataaagatagcaaatgagattatgggaaataaattagagttaaaggatatgattgacctagctactaaaatagagggccacccagataacgtagtacctgcaatggtaggtggcatggtagtatctttgaagacgggagaggatataaaatattcaaagatagatttgcctaagcagttaaagtttgtggccatgataccatcttttcaggtaaatacggctctttctagaaaggttttacctaagtcttatttaaaagaagaatgtatatttaatatatcaagatgtgctatgcttgtaagtgctctttacaatggggaatttgataagcttaggacatgttttcaggacaaaattcatcagccttatagaaaaaatttaataaaaaattctgatgatatctttaaaaaggcagtggaatttggttctataggtgagtttataagtggctcaggatctacacttatggctgtgttgaataaaaatgaggatgaatttgttatatctattaaaaggtatttaagtggactacaagataaatggaatgtaattttacttgaaccagatttagaaggagttagaattgttaagatctaa

SEQ ID NO: 438 - protein, 300 aa, Clostridium kluyveri DSM 555
MAKVKVRIPATTANMGPGFDTLGMALKLYNEIEVEEINGKTQIYNNGLKSEEDFGNNLIYKSIIETMNKGGYSYKGFKINVVKCDVPISRGLGSSSACIVGGIKIANEIMGNKLELKDMIDLATKIEGHPDNVVPAMVGGMVVSLKTGEDIKYSKIDLPKQLKFVAMIPSFQVNTALSRKVLPKSYLKEECIFNISRCAMLVSALYNGEFDKLRTCFQDKIHQPYRKNLIKNSDDIFKKAVEFGSIGEFISGSGSTLMAVLNKNEDEFVISIKRYLSGLQDKWNVILLEPDLEGVRIVKI

SEQ ID NO: 439 - DNA, 1242 bp, Clostridium kluyveri DSM 555
atgattaatatagcaatgcttggatatggtgtagtaggtagtggtgtagctgaacttatatttagaaatagagataaattcaaggatgaattaaatgaagaattggtattatcaaaaattttagttagaaatattagtaagcatatagataataaaaacaaagaacttttaacagaagatatagatgatatttttaaagaaaaagtggacatcatagttgaagctatggggggacttgatccatcttatgaatatgtaaaaagggctttaaatatgaaaaagcatgtggttacagctaacaaagatttaattgcggaatatggttatgaacttttacaaatagcaaagaaaaatggagttactattcattttgaagctagtgtagggggaggaatacctatacttaaatcaataaatgaatgtcttgtaggaaatgaaataaaaagcataaaatccatattgaatggtactactaattttatattgtctaaaatgaatcataatggcatgagctacacagaagcgctggaacttgcacaaaaattaggatttgcagaagccaatccagaatcagatgtgaagggatatgatgcggctagaaaactttcaattttatctacaattgcctacaataggagggtagactggaaggatataaacatagagggaattacagaaattgatgaatatgattttaaatatgctaagatggagaaatgcagtataaaattaatgggaattagtaaactaggcagtaaacatatatatgctacagttatgcctgttatggtaaaagaagattctgttcttgggaaaattgaggacgagtataacgctattttggtagaaggagatgctgtgggagatgttatgttttcaggaaagggcgcaggaatgtttcctactgccagtgcggtatttgcagatatagcggatatagttaaacagaagagaaaaaaatgtattacttttagcagtgaaaaggcagaaatagataagagctggggattgaagggaaagtggtttcttagagtaaagacacaaaatcgagtaaaaattatacagggtatatcttcgagttttaagagttgttatattttatccagtactttttcaggaaataaagaagaagtggtagcttttgtaaatgcagataatgaggtctgtatagataattatattgagaaagttaaatcagaaggagaagcctgtgatgttaaaaaattgttgattttacactaa

SEQ ID NO: 440 - protein, 413 aa, Clostridium kluyveri DSM 555
MINIAMLGYGVVGSGVAELIFRNRDKFKDELNEELVLSKILVRNISKHIDNKNKELLTEDIDDIFKEKVDIIVEAMGGLDPSYEYVKRALNMKKHVVTANKDLIAEYGYELLQIAKKNGVTIHFEASVGGGIPILKSINECLVGNEIKSIKSILNGTTNFILSKMNHNGMSYTEALELAQKLGFAEANPESDVKGYDAARKLSILSTIAYNRRVDWKDINIEGITEIDEYDFKYAKMEKCSIKLMGISKLGSKHIYATVMPVMVKEDSVLGKIEDEYNAILVEGDAVGDVMFSGKGAGMFPTASAVFADIADIVKQKRKKCITFSSEKAEIDKSWGLKGKWFLRVKTQNRVKIIQGISSSFKSCYILSSTFSGNKEEVVAFVNADNEVCIDNYIEKVKSEGEACDVKKLLILH

SEQ ID NO: 441 - DNA, 438 bp, Clostridium kluyveri DSM 555
atgaaaaataaatttcttataattgatactagcatacttcctgatgtgtttgacaaagtggtaaaggtaaaggaacttcttagaactggccatgtgaaggatatatcagaaggagtaaaacaagtaggtataagcagaagtacttattataaatatagggattcagtctttaccttgtctgaaagcgtggcagggcataaaataactctgggattaactttagctcataaggcaggaacattatcgaaaatacttgataatatagctcagaagaaaggaaatatacttactataaatcaagatatacctattaataatgccgctaatgtatctataacttttgatgcttctcagctagaggttgaagttaacgagttgatggaagatataagaaccttaaaaagtgttataaaggtaaatttagctgcagtagagtaa

SEQ ID NO: 442 - protein, 145 aa, Clostridium kluyveri DSM 555
MKNKFLIIDTSILPDVFDKVVKVKELLRTGHVKDISEGVKQVGISRSTYYKYRDSVFTLSESVAGHKITLGLTLAHKAGTLSKILDNIAQKKGNILTINQDIPINNAANVSITFDASQLEVEVNELMEDIRTLKSVIKVNLAAVE

SEQ ID NO: 443 - DNA, 549 bp, Clostridium kluyveri DSM 555
atgataagaactataggaatgatagagttaaacagtatagctaggggaataaagacagcagatgccatgataaaggcagcagaagttgaattactgttggcaaaaactatttgtcctggtaaatacattgtattgattacaggaaatgtaggagctgttacagcttcaatagaggcagcagtgagcataggaggaaaacatgtagtagacaagttattgcttccaaatgttcatgaacaggtaattcctgcagtaaatgaggctacaggtgttgtaaaattaaaggatttaggagttatggaattctttagtgtggcaacaggaattgttgcagcagatgcggcagctaaagctgcagatgtacagcttatagaagttagattaggaatgggaatgggcggaaaatcttttgtaactcttacaggagatgtaagtgcagttaagaatgcaatagaagctggagttaatgtttcacttgaaactggaatgcttgtaaacagtgaagttgtatctggaccaaacagagatttgctgccacatttgttatag

SEQ ID NO: 444 - protein, 182 aa, Clostridium kluyveri DSM 555
MIRTIGMIELNSIARGIKTADAMIKAAEVELLLAKTICPGKYIVLITGNVGAVTASIEAAVSIGGKHVVDKLLLPNVHEQVIPAVNEATGVVKLKDLGVMEFFSVATGIVAADAAAKAADVQLIEVRLGMGMGGKSFVTLTGDVSAVKNAIEAGVNVSLETGMLVNSEVVSGPNRDLLPHLL

SEQ ID NO: 445 - DNA, 1329 bp, Clostridium kluyveri DSM 555
atggatttactaaaaaaagttaaagatgcaggtattataggagctggaggagcaggatttcctactcatgtaaagctgaataccaaagttaaatatttcatagtaaatgctttagaatgtgagccgctattacagtcagataaatatttgatgagaaatcacagtgatgaaatagtaggagcaacagagataataggaaaatcattaggggcagaaaaaattgtaataggtttaaagaacgtttattataatgaaatagatgcacttacaaattctataaagaagttaaattcttcagtagaactgtttttaaacagaagtttttatcctgcaggggatgagcagatactggtttatgaagtaacagggaagacaatagcaccaggagcaataccttcaactgtaggagcagtggtatcaaatgtaggtacagtatttaatgtatttgaagctcttaaggatgagcccgttacatacaaatatgtaactgttgtaggagaagtggcaagtcctgccatagttaaagttcctataggtacaaaagttacagaatgtatagaaaaatgcggtggagccacattaggcgactacgtagtaataatgggcggacctatgatgggaaagaaaatctcaaaagaggaagcagaaaacacagttattacaaaaactaacgggggaattatagtaattccaaaggatcattatgtagctgcaagagaaagacttactatagaggaaatggtacacagagcaaaagcagcctgtgaacaatgccgttattgtacagaattatgtcctagatatcaaattggacatccactacacccacataaaataatgagaactatggcattagggagaaacgatgaagaagttctcaaggaagcaataatgtgctgccagtgtggagtatgtgaaatgtatgcatgtccaaatgggttatctccaagacgtataaatggatatgtaaaagctcagtttggagctaaaggtataaaatggaagaataaaacagatgtattcacaggagatcctcagagagaattcagaaaagttcctacaggtatgcttataacaagacttggaatgaataagtataagggacaaccatataaagaaaatgaagagttggtaccagcacaggtaagtgtccctttgaaacagggtataggtgcaccatctacagcagttgtaaaagtaggagatgtggttaaaaaaggacagatgataggggcaatagacgaaggaaaaatgggaacaaatgtacatgccagcatcgacggaactgttgttgaagtaaatgaaaatgtagtcataaaagctatttaa

SEQ ID NO: 446 - protein, 442 aa, Clostridium kluyveri DSM 555
MDLLKKVKDAGIIGAGGAGFPTHVKLNTKVKYFIVNALECEPLLQSDKYLMRNHSDEIVGATEIIGKSLGAEKIVIGLKNVYYNEIDALTNSIKKLNSSVELFLNRSFYPAGDEQILVYEVTGKTIAPGAIPSTVGAVVSNVGTVFNVFEALKDEPVTYKYVTVVGEVASPAIVKVPIGTKVTECIEKCGGATLGDYVVIMGGPMMGKKISKEEAENTVITKTNGGIIVIPKDHYVAARERLTIEEMVHRAKAACEQCRYCTELCPRYQIGHPLHPHKIMRTMALGRNDEEVLKEAIMCCQCGVCEMYACPNGLSPRRINGYVKAQFGAKGIKWKNKTDVFTGDPQREFRKVPTGMLITRLGMNKYKGQPYKENEELVPAQVSVPLKQGIGAPSTAVVKVGDVVKKGQMIGAIDEGKMGTNVHASIDGTVVEVNENVVIKAI

SEQ ID NO: 447 - DNA, 549 bp, Clostridium kluyveri DSM 555
atggtaagaactataggaatggtagagttaaatagtatagcgaaaggaataaaaacagcagatgccatggtaaaggctgcagaagtaaagctgcttttatcaaagactgtttgtccaggaaaatacattatattgattacaggaaatgtaggagctgttacagcttcaatagaagcgggagtaagtataggaggacagcatgtagtagacaagttattacttccaaatgtacatgaacaggtaattcctgcaataaatgaagcaacaggtgtttcacaattaaaagacctaggagttatggagttcttcagtatagcaacaggtatagttgcagcagatgcagcagctaaatcagcagatgtacagcttatagaagttagaatgggagttggagtaggaggaaaatccttcgtaactttaacaggagatgtaagtgcagttaagaatgcagtagaagctggagttaatgtttcacttgaaactggaatgcttgtaaatagtgaagttatatccggaccaagcaaagatttattacaatatttattgtaa

SEQ ID NO: 448 - protein, 182 aa, Clostridium kluyveri DSM 555
MVRTIGMVELNSIAKGIKTADAMVKAAEVKLLLSKTVCPGKYIILITGNVGAVTASIEAGVSIGGQHVVDKLLLPNVHEQVIPAINEATGVSQLKDLGVMEFFSIATGIVAADAAAKSADVQLIEVRMGVGVGGKSFVTLTGDVSAVKNAVEAGVNVSLETGMLVNSEVISGPSKDLLQYLL

SEQ ID NO: 449 - DNA, 1326 bp, Clostridium kluyveri DSM 555
atggatttactaaaaaagattaaagatgcaggtattataggagctggaggagcaggatttccgactcatgtaaaactgaatactaaagttgaatatttcatagtaaatggtttggaatgtgaaccattgctgcagtcagataaatatttgatgagaaattacagtgacgaaatagtagagacagtacagaaaataggggaagcaattggagcagcacatgctgtaataggcttaaaagcagcttaccatactgaaatagaagcacttaaaaagtccataaacaaattgaattcaacagtagagttatttttaagtgaagcattttatcctgcaggtgatgagcaagtattggtttatgaagtaacaggaaggacaataccaccaggaggaataccttcaagcgtaggagcagtggtatcaaatgtaggtacagtagttaatattgctgatgctattaatgataaaccggttacatataagtatgtaactgttataggagaagtaggaaacccttcaatcataaaagttccaataggaacaaaagttatggaatgtatagacaaatgtgggggcactacagtagatgactatacagtaataatgggtggacctatgatgggaaagaagctttcaaaagaggaagcagaagacacagttattacaaagactaatggaggaattatagtaattccaaggaaccatcttatacagcaaaaagaatcaatatcaatagatcacatgataaacaaggcaaaatcatcctgtatacaatgtcattattgtacagatatgtgtccaagattcttaattggacatccattgcatccacacaaggtaatgagaggcatagctttggctgaaggaaatgaagcacttaaagaagcaataatatgctgtcaatgtggagtgtgtgaaatgtttgcatgtcctatgggattgtcaccaaggagaatgaatgcatatgttaaagcacagatgatggcaaagggtataaaatggaagaatgaaacagaccaatttgaaggcagaataatgagagaagaaaagagaataccaacaggtagattaatcgcaagattaaaaatgagtaaatataaaggacagtcaattaaagagggagaagaattagtcccaggacaggtaagtattccattgaagcagggacttggagcaccatctacagcaatagtttctgtaggagatgtagtggaagtaggacagatggtaggtgcaatagacgaaggaaaaatgggaacaaatgtgcacgccagcattaaaggcgaagttgtagaagtaaatgaaaatgtagtcataaaggctatataa

SEQ ID NO: 450 - protein, 441 aa, Clostridium kluyveri DSM 555
MDLLKKIKDAGIIGAGGAGFPTHVKLNTKVEYFIVNGLECEPLLQSDKYLMRNYSDEIVETVQKIGEAIGAAHAVIGLKAAYHTEIEALKKSINKLNSTVELFLSEAFYPAGDEQVLVYEVTGRTIPPGGIPSSVGAVVSNVGTVVNIADAINDKPVTYKYVTVIGEVGNPSIIKVPIGTKVMECIDKCGGTTVDDYTVIMGGPMMGKKLSKEEAEDTVITKTNGGIIVIPRNHLIQQKESISIDHMINKAKSSCIQCHYCTDMCPRFLIGHPLHPHKVMRGIALAEGNEALKEAIICCQCGVCEMFACPMGLSPRRMNAYVKAQMMAKGIKWKNETDQFEGRIMREEKRIPTGRLIARLKMSKYKGQSIKEGEELVPGQVSIPLKQGLGAPSTAIVSVGDVVEVGQMVGAIDEGKMGTNVHASIKGEVVEVNENVVIKAI

SEQ ID NO: 451 - DNA, 549 bp, Clostridium kluyveri DSM 555; identical to SEQ ID NO: 443

SEQ ID NO: 452 - protein, 182 aa, Clostridium kluyveri DSM 555; identical to SEQ ID NO: 444

SEQ ID NO: 453 - DNA, 1329 bp, Clostridium kluyveri DSM 555; identical to SEQ ID NO: 445

SEQ ID NO: 454 - protein, 442 aa, Clostridium kluyveri DSM 555; identical to SEQ ID NO: 446

SEQ ID NO: 455 - DNA, 549 bp, Clostridium kluyveri DSM 555; identical to SEQ ID NO: 447

SEQ ID NO: 456 - protein, 182 aa, Clostridium kluyveri DSM 555; identical to SEQ ID NO: 448

SEQ ID NO: 457 - DNA, 1326 bp, Clostridium kluyveri DSM 555; identical to SEQ ID NO: 449

SEQ ID NO: 458 - protein, 441 aa, Clostridium kluyveri DSM 555; identical to SEQ ID NO: 450

SEQ ID NO: 459 - DNA, 282 bp, Clostridium kluyveri DSM 555
atgtttttagctaaagtagtgggaaacgttgtttctactcaaaagcatgaaaagctcataggaaataaacttctaatagttaaaaaactagatgaaaaagaaaatataatacaaactgaacctatggttgctatagatacagtaggtgccggcattaacgaaattgttattgtggttacaggaagtggagcaagaaaagcaagcaatactatagatataccaacagatgcttcaattgtggggattgtagattccgttgagtggaacgaaagtttgatttaa

SEQ ID NO: 460 - protein, 93 aa, Clostridium kluyveri DSM 555
MFLAKVVGNVVSTQKHEKLIGNKLLIVKKLDEKENIIQTEPMVAIDTVGAGINEIVIVVTGSGARKASNTIDIPTDASIVGIVDSVEWNESLI

SEQ ID NO: 461 - DNA, 951 bp, Clostridium kluyveri DSM 555
atggatattcaagatttactaaggcctatagttactcaaattgtaaatatgttaaacaagagagcacttttgtttatatctggaggagaagtcaacttaaaagaaatatttgaatctctttcttccatgggcattataaaatacgatatagttatgacagaaaatgccaaaagtgttattccagaaagttacattagtagtttaaaaggaaagatgatagaatctaaagaagaattgagtggtgctttaaaagcagatgatttaatagtaatacctgtaatgactagaaacacattgtctaagtgtgcggttggaatacaagataacttagttactacggggatagcagaagctcttatgatggataaagaaataattgcagtaacagatagttttgatccagaaaatcctacaaatgtgtctttaggacttaataaaaataaagcatataataaatttatattgaattacaaggatactttgagtagtttaggaattaattttgtagaaggaaataacttgaagaaagcaatagaagaaaaatgtgttcttataaatcacaggactgtacatggtgaggaaaagagtgagcctgtgaataaagagaatatggaagatctgatcagtgctatagtagaaaaacaaataaatagcagactcggaaatatgaagccagtaaacaatactgtacaacaacaagcaagtaatactgtagaaaaagtaaaagacacaccaacagtttgtgagattccaaaggtatcttcagatacaagttcaaatgaaccaaaagtagttgaagacaaaggaatgttatcggggattataacaatgaaagatattatgcaaaatgctcacgggtgtaaagaaattaatgtaaaagaaggtgctttaataactcctttagcaaaagattatataaaaaataatgatataactgtaaggtattgttaa

SEQ ID NO: 462 - protein, 316 aa, Clostridium kluyveri DSM 555
MDIQDLLRPIVTQIVNMLNKRALLFISGGEVNLKEIFESLSSMGIIKYDIVMTENAKSVIPESYISSLKGKMIESKEELSGALKADDLIVIPVMTRNTLSKCAVGIQDNLVTTGIAEALMMDKEIIAVTDSFDPENPTNVSLGLNKNKAYNKFILNYKDTLSSLGINFVEGNNLKKAIEEKCVLINHRTVHGEEKSEPVNKENMEDLISAIVEKQINSRLGNMKPVNNTVQQQASNTVEKVKDTPTVCEIPKVSSDTSSNEPKVVEDKGMLSGIITMKDIMQNAHGCKEINVKEGALITPLAKDYIKNNDITVRYC

SEQ ID NO: 463 - DNA, 999 bp, Clostridium kluyveri DSM 555
ttggcaagaaagctttcaagaattttattaggagtaaatgatccacctaagaaatcttcaaaacgtgatgtgcctaaagaaactccaaaggaagtttcagaagaaacgccaaaacagaattcaaaagaagtctcaaaagaaaaaagcgtacctaagaaaccagctaaaaaaagtatattagatgatgctaatgcattcataatggatatggaaaaagtcatgaaaaagcctagggcagtgggaaaagatgataaattaaaggttggagtagatttaggtacttctaatattgttgtagcagtattagatgagaaaaataaaccagtggcaggagaattattttctgcaaatgtagttagagatggtatagttgttgaatatctaaatgctgtgactatactcagaaaattaaaaggtaaattggagggtactttaaatagagaattattgtatgctgctacagctatacctccaggaataagtacagggaatacaaaagttattcaaaatgtggtagaagcagcagaatttcaagtaagtaatgtagtagatgagccaactgcggcttctgaagttttaaaaataaaaaatggtgcagtggtggatgtaggtggtggaactacgggaatatccatattacaagatggagaagtagtgtattcagcagatgaacctacgggaggacatcatttaagtttagttgtagctggagcacttcagatggattatgaagcggcggaaaaatataaagttgatatgaaaaattataatagagtgtttacattggtaagaccagtagtagaaaagatggcagatatagttgttcagcatattaagggatttaatgtaaatgaaatttatctggttggaggaacctgttgtctaaaagatatagaaaagatatttgaaaagtatacaggtataaaaactattaaaccacatgatccccttttagtaacacctatgggaattgctatgaatgatactaaattcagttag

SEQ ID NO: 464 - protein, 332 aa, Clostridium kluyveri DSM 555
MARKLSRILLGVNDPPKKSSKRDVPKETPKEVSEETPKQNSKEVSKEKSVPKKPAKKSILDDANAFIMDMEKVMKKPRAVGKDDKLKVGVDLGTSNIVVAVLDEKNKPVAGELFSANVVRDGIVVEYLNAVTILRKLKGKLEGTLNRELLYAATAIPPGISTGNTKVIQNVVEAAEFQVSNVVDEPTAASEVLKIKNGAVVDVGGGTTGISILQDGEVVYSADEPTGGHHLSLVVAGALQMDYEAAEKYKVDMKNYNRVFTLVRPVVEKMADIVVQHIKGFNVNEIYLVGGTCCLKDIEKIFEKYTGIKTIKPHDPLLVTPMGIAMNDTKFS

SEQ ID NO: 465 - DNA, 663 bp, Clostridium kluyveri DSM 555
atggtagaaataaatgaaaaactaatacaagatatagtagctaaaatcgtaactggaaataaacctgaacctaaggctgaaattgataaagatggattttctatacctgtaggtatatccaatagacatatacatttaactaaagagcatttagaatgtttatttggtgaaggatatgaattaacagttaaaggttcagtaaaacaaccaggacaatttgcagcaaatgaaactgttgccattgcaggaccaaaagctatttttcctaaagtaagaattttaggacctataagaagctatagccagattgaaatatccagaacggattcacgtactcttggcataaaagcaccagttagaaattctggagatttagataattcagcaactctttctgttattggacctaagggatcaataatcctaaagaatggagttatatgtgctaatagacatgttcatatgttaccagaacaggcaaaggtttatgaggtaaaagatggagacttagtaaaggtagaaactatgggagataaaggagttattttcaaaaatgttttagttagagtaactaatacttctgctttagaattccatatagatacagatgaagctaatgcgtgtgaaataaaaaatgatgctttagttagaatattaaaataa

SEQ ID NO: 466 - protein, 220 aa, Clostridium kluyveri DSM 555
MVEINEKLIQDIVAKIVTGNKPEPKAEIDKDGFSIPVGISNRHIHLTKEHLECLFGEGYELTVKGSVKQPGQFAANETVAIAGPKAIFPKVRILGPIRSYSQIEISRTDSRTLGIKAPVRNSGDLDNSATLSVIGPKGSIILKNGVICANRHVHMLPEQAKVYEVKDGDLVKVETMGDKGVIFKNVLVRVTNTSALEFHIDTDEANACEIKNDALVRILK

SEQ ID NO: 467 - DNA, 1092 bp, Clostridium kluyveri DSM 555
atgaatggagaagctattggtgttattgaaactattggaatgactgcagcagttgaagctgcagatagttgtgtgaaatcggctaatgtgacccttataggctatgagttgtcaacaggaggacttgtaacaattaaaatagaaggtgacgtaggagcagttaaagctgccattgatgcaggaaaagtaagtgcagaaagaataggtactgtggttggaacgcttgtcataccaaggcctgcacagaatttacacaagattatagaatccaattcaacagtaggaattaaaaatacagaatcagaaaaaaatttaatttgtgataaagatgtggacgtacaagaaactttagttactgaaaagaatttagaaactgaagggctggaagaaaaaccagtttcagaggaaactaaaaagcctgaagaggagtcagttctagaggaagctgaagagcctgaagaagaaccagtttcagaagaaactgaaaaacctgaagaggagccagttccagaagaaactgaagagtctgaagaggaatcagttccagaggaagctgaggagtccgaagaagaaccagtttcagaagaaactgaaaaacctgaagaggagctagttccagaagaaactgaagaaccagaagaagagtcagtttcagaagaaactgaggaatcaaaagaagaatctgtttcagaagagattgaagaatcggaagaaaagccaatttcagaagaaactgaagaaccagaagaggattcagttccggaagaaactagagaaccggaagatttagctcttgagaaaaatatagaatcggaaaaagatttaactcctgaaaaagatgtagagtcagaagagaatttgactctcaaggaaagcgtagagccaaatgataataattttaatgaagaagcaaaggaaaaagacgaagaagtagctgttaaaaaagataaaggtaaaactggaaatcatgtttcttcaaaaaagaatgctaaggataatgaagtatgtaatatatgtcgtgatcctgcatgccctaggagaaaaggacagccaaggcatttatgccttcattataaaaagatgggaaagtga

SEQ ID NO: 468 - protein, 363 aa, Clostridium kluyveri DSM 555
MNGEAIGVIETIGMTAAVEAADSCVKSANVTLIGYELSTGGLVTIKIEGDVGAVKAAIDAGKVSAERIGTVVGTLVIPRPAQNLHKIIESNSTVGIKNTESEKNLICDKDVDVQETLVTEKNLETEGLEEKPVSEETKKPEEESVLEEAEEPEEEPVSEETEKPEEEPVPEETEESEEESVPEEAEESEEEPVSEETEKPEEELVPEETEEPEEESVSEETEESKEESVSEEIEESEEKPISEETEEPEEDSVPEETREPEDLALEKNIESEKDLTPEKDVESEENLTLKESVEPNDNNFNEEAKEKDEEVAVKKDKGKTGNHVSSKKNAKDNEVCNICRDPACPRRKGQPRHLCLHYKKMGK

SEQ ID NO: 469 - DNA, 531 bp, Clostridium kluyveri DSM 555
atgagtagtaatgatttaatagaacaaatagttaaagaagttttgaaaagtatggaatctattcaaaatgatgaacagaaatatgagtctgaagaaattcatggcagtggaagagcttgtgaaattgtaagtaaaaaagattatcctttaggtaagaagagaccagagcttataaagacaagtacaggtaaatctatagatgatataagtttagaaaatgtgttaagtggaaaaataactttagatgatgttaagataaataagaaaacacttttatatcaagctcaaatagcagaatctgtgggtaatattcaacttgcagcaaattttagaagagcagctgaactcactgtagttccagatgctagggtattggagatttataatgccttgaaacctcataaatctacaaaacagcaattaattgaaatagcagaagaacttgaaagtaagtataaggctaaattaaatgctgagcttgttagggaagcagctgagtcatatgaaaaaagaaatatgataaaagtgtag

SEQ ID NO: 470 - protein, 176 aa, Clostridium kluyveri DSM 555
MSSNDLIEQIVKEVLKSMESIQNDEQKYESEEIHGSGRACEIVSKKDYPLGKKRPELIKTSTGKSIDDISLENVLSGKITLDDVKINKKTLLYQAQIAESVGNIQLAANFRRAAELTVVPDARVLEIYNALKPHKSTKQQLIEIAEELESKYKAKLNAELVREAAESYEKRNMIKV

SEQ ID NO: 471 - DNA, 1665 bp, Clostridium kluyveri DSM 555
gtgagaagatctgaaagatttgagatattagaacaaaggtcaattcataaggatggctttgtggaagaatggccggaaataggacttgcagccatagaaagtcctaataatcctattccaagtgttaaagtggaagatggaaaaataattgagatggatggaaagagcagagaagagtttgattttatagatatctttcttgcagaacattcaatcaatgtaagaaatacagaaaaagccatggcaatggattcactggatattgctagaatgttggtggatataaatatttccagggatgaaattatgaatatagccaattcacttacagcggcaaaattggtagaaataattagtaacttaaatgtagtagaaatgatgatggctcttcagaagatgaaggccagaaggacacctgcaaaccaagcatgtgtgactaatttgcgggataatcctgttcaaattgcggcagattcagcggaaggagcccttaggggttttgcagaaatggaaacaagggcaggaatgttaagatatacccttttcaatgcaatttcaattttaataggttctcagacaggaaggcctggggtattaacacaatgcttactgggagatgctacagaaattaaattgagtatgcttggttttgcttcttatgtggaaactatatctgtatatggtacagaaagtgcatttgtagagggtgatgatactccctggtctgattcttttttagcttcagcatatacttcgaggggatttaaaatgaggttttcttcaagcattggttctgaagttcaaatgggatattcagagggaaaatcaatgctttatttagaagcaagatgtataatgatggctaaaggtacaggggttcaaggattgcaaaatggattagtaaatggtgtaggcatttcagcagcagtaccagaaggtatgagggcaatcttaggaagaagccttataattgaaatgcttggactagaagttgtatcaggtaatgagcaagttttgacaaattctgaaattagaaaaacttcaaaagctatgttgcaatttctgcctggagttgattttgtatctccggggtataattctactccaagttacgataatatgtttacacattccaattggaatgcagaagattatgatgactggttaattttacaaagagatttaagaattgatgggggtcttaagcctgttaaagaagaaaaagttatagcagttaggaataaggctgctagagcaattcaggctttatttaaggaattaggattgccatctataactgatgaagaagtggaagctgcaacttatgcccatggcagtagagatatgccagctagaaatgtagaagaagatttaaagtcaattgaaaaattattgaataagggcattacagttttagatatagttaagggactttacagcggaggctttgctgatgttgctgaaaatatacttaatatgtttaagcagagattaataggggattatttgcaccagtcttcaatatttgatgagcagtataatgttataagtgcaataaatgatagaaacgattatatgggccctggaactggttatagggtggaagcaaaaaaatgggatgaattgaagaatgtaaactttgctttagaaccccataagatttaa

SEQ ID NO: 472 - protein, 554 aa, Clostridium kluyveri DSM 555
MRRSERFEILEQRSIHKDGFVEEWPEIGLAAIESPNNPIPSVKVEDGKIIEMDGKSREEFDFIDIFLAEHSINVRNTEKAMAMDSLDIARMLVDINISRDEIMNIANSLTAAKLVEIISNLNVVEMMMALQKMKARRTPANQACVTNLRDNPVQIAADSAEGALRGFAEMETRAGMLRYTLFNAISILIGSQTGRPGVLTQCLLGDATEIKLSMLGFASYVETISVYGTESAFVEGDDTPWSDSFLASAYTSRGFKMRFSSSIGSEVQMGYSEGKSMLYLEARCIMMAKGTGVQGLQNGLVNGVGISAAVPEGMRAILGRSLIIEMLGLEVVSGNEQVLTNSEIRKTSKAMLQFLPGVDFVSPGYNSTPSYDNMFTHSNWNAEDYDDWLILQRDLRIDGGLKPVKEEKVIAVRNKAARAIQALFKELGLPSITDEEVEAATYAHGSRDMPARNVEEDLKSIEKLLNKGITVLDIVKGLYSGGFADVAENILNMFKQRLIGDYLHQSSIFDEQYNVISAINDRNDYMGPGTGYRVEAKKWDELKNVNFALEPHKI

SEQ ID NO: 473 - DNA, 279 bp, Clostridium kluyveri DSM 555
atgggacaagaagcattaggtatgattgaaacaaaaggattggttggagctattgaggcagctgattcaatggtaaaggcagcaaatgttcaattaataggaaaagaacaaataggttcaggacttgtaaccgttatggtaagaggagacgtaggtgcagtaaaagctgctacagatgcaggggctgcttcagctaagagagtaggagaacttgtatcagtacacgttattccaagacctcatacagatgttgaaaagatattacctaaaattggttaa

SEQ ID NO: 474 - protein, 92 aa, Clostridium kluyveri DSM 555
MGQEALGMIETKGLVGAIEAADSMVKAANVQLIGKEQIGSGLVTVMVRGDVGAVKAATDAGAASAKRVGELVSVHVIPRPHTDVEKILPKIG

SEQ ID NO: 475 - DNA, 1374 bp, Clostridium kluyveri DSM 555
atgataaatatagatagggaattatgtacaggttgtagacgatgtgccgatgtatgtccagtagatgctataggaggcaacaaaggtgaaccacaggcaatagatatggaaaaatgtattatgtgcggccaatgtattcaaatttgtaaaggatattattctatatatgatgatgttgctacacctgtgagtaaaaaattgtttgataggggattattagataatgtagatgaaccactttttgcggcatatagtacaagcaggattaaaaatgttaaggaaatacttagaaatacagacgtatttaaaatcgtgcagtgtgctcctgctgtaagagttgccataggagaagagtttggactgccttttggaactttaagtgagggaaaaatggcagttgtacttagaaaaattggatttgatagggtatatgatacaaattttggggcagatcttactataatggaagaaggtagtgaactattagataggataacaaaagggggaaccttacctatgtttacttcttgttgtccagcatgggtgaaatacatggaacaaacttatccagaacttttgcctcatctttccagttgtaaatctcctcagcagatggctggtgccatttttaaaagttatggagctgaaataaataaagtgaatccagctaagatatataacgtagctgttatgccctgtacctgtaaagaatttgagagtgaaagagaagaaatgagctgtaatgaatataggagtgtggatatagttataactacgagagaattagcacacttaataaaggatgcggatattgactttaatactctttccgatgataaatttgatgatgtgctggggatgtatactggagcgggaactatatttggttctactggaggtgtaatggaagcagcccttagaacaggatatgaattatatactaagaaatctattcctaaaatagaacttactgatatcagaggaggacaaggatttagaactgcagaagtggaattaggagattttaaattgaaggtagggatagtatcaggtttaaagcatgtaaaaaaagtattggatatgataaaaaagggaaaatgtgatatgcattttatagaggtaatgacgtgtccagaaggctgtgtcagtggaggaggacaacccaaaattatatttgaatcagataagaatatagcctatgatgctagaaaaaggggactttacaatcatgattccagtcttccttatagaaagtctcatgagaacccaggtatacaaaaattatatagtgaatttttaggagaacctttaggatataaatctcatgaactgctgcacacaaaatataaatcaagaaagaatattactttataa

SEQ ID NO: 476 - protein, 457 aa, Clostridium kluyveri DSM 555
MINIDRELCTGCRRCADVCPVDAIGGNKGEPQAIDMEKCIMCGQCIQICKGYYSIYDDVATPVSKKLFDRGLLDNVDEPLFAAYSTSRIKNVKEILRNTDVFKIVQCAPAVRVAIGEEFGLPFGTLSEGKMAVVLRKIGFDRVYDTNFGADLTIMEEGSELLDRITKGGTLPMFTSCCPAWVKYMEQTYPELLPHLSSCKSPQQMAGAIFKSYGAEINKVNPAKIYNVAVMPCTCKEFESEREEMSCNEYRSVDIVITTRELAHLIKDADIDFNTLSDDKFDDVLGMYTGAGTIFGSTGGVMEAALRTGYELYTKKSIPKIELTDIRGGQGFRTAEVELGDFKLKVGIVSGLKHVKKVLDMIKKGKCDMHFIEVMTCPEGCVSGGGQPKIIFESDKNIAYDARKRGLYNHDSSLPYRKSHENPGIQKLYSEFLGEPLGYKSHELLHTKYKSRKNITL

SEQ ID NO: 477 - DNA, 537 bp, Clostridium kluyveri DSM 555
atggaagagcatgcaaattcttttgtaatggcaaattcaaataaatgcataggatgtagagcctgtgaaattgcctgtgctgcaaggcatagaaaaaataattctggaggtactgttggaactatgaataatgaagtggtacctagattatttcttgtcaaaaaagagagtatggcaatgcccatacaatgtagacattgtacagaagctttttgtgtaaatgtttgtcctgtgaaagctatagttgaaaatcatgggtcaatatttgttcaggaggataagtgtataggatgcaaaaattgtatgctggtatgcgcagtaggagctgtgaatttgttaccaagaattgaaagtcaggtgagtaaaggtaggatcaaacctaaagctagtgccgtagcatataaatgtgatttatgtatagaagaaggtggaaaacctgcctgtatcgaagaatgttcacagggagctttgaaattagtaaaatgtgaagaaaataaacactatagtggagagcttaatactaagaaaacattataa

SEQ ID NO: 478 - protein, 178 aa, Clostridium kluyveri DSM 555
MEEHANSFVMANSNKCIGCRACEIACAARHRKNNSGGTVGTMNNEVVPRLFLVKKESMAMPIQCRHCTEAFCVNVCPVKAIVENHGSIFVQEDKCIGCKNCMLVCAVGAVNLLPRIESQVSKGRIKPKASAVAYKCDLCIEEGGKPACIEECSQGALKLVKCEENKHYSGELNTKKTL

SEQ ID NO: 479 - DNA, 762 bp, Clostridium kluyveri DSM 555
atgaaaattgtgataaatggtgaaaattatgaaacccaaaaaggagataccatattaaaagtagctagaagaaataatatatatatacctacactatgtcatagtgatgcattgcctggtttggctacctgtagattttgtatagtagaggttatagatggagaagaatctaaagtggcggcttcttgtatatctcctgcgaatccgggaaatagggaaatagaagtcataactgattcagataagataaaaaggatgaggaaagtcatagctatgctgcttcaggctagatgtcccaataataaagaagtagaaaaatttgcaaaagcttttggagtagagaaaagaaaagtaaatagatttaaattagaaaaaggagaagattgtgctttatgtggactttgtgtaaaggcctgtaaggcagtgggggtgggagtactttctttagtcaacaagggtatatataagaaattggatacttctgataaatccacacaaaaatgtatagggtgtggttcctgtgctaatgtatgtcccactaatgccatagacattatagataaagatggcaaaagagaaatatggggcaataaatttaaaatggtgaaatgtgattgctgtggagaatactttgctacggaagagcatgttaaatatgcttatgataagttaggaatagaacaaccggaaagattttactgcagcaggtgtaaacgggaacaagcagttcagggtatgaaccatgtattgggaagtatttaa

SEQ ID NO: 480 - protein, 253 aa, Clostridium kluyveri DSM 555
MKIVINGENYETQKGDTILKVARRNNIYIPTLCHSDALPGLATCRFCIVEVIDGEESKVAASCISPANPGNREIEVITDSDKIKRMRKVIAMLLQARCPNNKEVEKFAKAFGVEKRKVNRFKLEKGEDCALCGLCVKACKAVGVGVLSLVNKGIYKKLDTSDKSTQKCIGCGSCANVCPTNAIDIIDKDGKREIWGNKFKMVKCDCCGEYFATEEHVKYAYDKLGIEQPERFYCSRCKREQAVQGMNHVLGSI

SEQ ID NO: 481 - DNA, 963 bp, Clostridium kluyveri DSM 555
atgggcaataaaaagaaaatttatgtatgttgtggaacagggtgtatagctaaaaatagtatgtcaatttttgaagaattcagagataaaatacacgagatggaaattgatgcagaagtatcagctaagttgacatccagcgtatgtagtggaatatgtgataagggccctgtagttaaaatttatccgaatataacttattatggggttaaaattaaagatgttgaagaaataattcaaaggacagtggtgaatgatgaaattgttagtagattgataaaaactactccttctatgaaggagaagttaaaagattatcatgaaagtggattttataaaagacagtataaagtagctctaaaaaatgtggatgatatagatcctactaccatagatcaatatattgaaaaaggtggatatgaagctttaaaggaagtactacttgaaatgaaaccggaaattattataggtgatagaaattgcatggtggatgttgttaaagattacttgaattttttaagtaaagaattttgcgggaaatgtataccctgtagagagggagtaaagagaatgctggagatggctactgatatctgtgaaggtaatgcaaaggaaagagatatagaaaatatgcttcagatgtcttatgttatcagtcaagcttctttatgcaatcttggtaagcgggcacagaatccaataatgattgctattagatactttagagatgaatttgaggaacatttgaaaaataagcgatgtagacaaggagtttgtaaaaatctcactaccttttatatagataaagataagtgcatgggatgtaacttatgtaagaagaattgcgacagtaattgtattacaggggaatttaaaaaacctcatgaaatagatgagagtaaatgcataagatgtggcaattgtatagatatatgtagatttgatgctattaagattttataa

SEQ ID NO: 482 - protein, 320 aa, Clostridium kluyveri DSM 555
MGNKKKIYVCCGTGCIAKNSMSIFEEFRDKIHEMEIDAEVSAKLTSSVCSGICDKGPVVKIYPNITYYGVKIKDVEEIIQRTVVNDEIVSRLIKTTPSMKEKLKDYHESGFYKRQYKVALKNVDDIDPTTIDQYIEKGGYEALKEVLLEMKPEIIIGDRNCMVDVVKDYLNFLSKEFCGKCIPCREGVKRMLEMATDICEGNAKERDIENMLQMSYVISQASLCNLGKRAQNPIMIAIRYFRDEFEEHLKNKRCRQGVCKNLTTFYIDKDKCMGCNLCKKNCDSNCITGEFKKPHEIDESKCIRCGNCIDICRFDAIKIL

SEQ ID NO: 483 - DNA, 1227 bp, Dethiosulfovibrio peptidovorans SEBR 4207, DSM 11002"
gtggaagaattggagtacggttctctggagtggtggcatcagaccgtcaatataggagtcctacaggagatcctggatagattcgcccagatattgaactgtggtgcggttctcactacggccttgggagttccgataaccacccccagcaattttacaaggttttgccgtctcatgcggtccaccgaggaaggtcggagactgtgttgggagagcgatgccgccggtggaagggctgggctggaacagggaaaggtaagaatatatcgctgtcatgcgggattgatagatatggctctcccagtggtaatagagggtcgtctggccggggtggtgctttgcggtcaggtaaagcttagacactatacccgtcaggaggtggaggagctcgccggagtcggttggcagaatctctccaaccgggacgaactggtggacctgttcatggaagctccggttgtccccagggaggtcatagaccagggaggagagcttataaagctggtctcgtcccacgtcgtggagctatgcgagcgccgtttggcggagaagaagttactcgtaaaggacctggtcctcatgagggagaaatgcgataagcagtctctcgagagaaacctgaagatcagtcagataaaggctctcagacatcaattgaacccccacttcatgttcaataccctcaacgccatagttcgcctcgccatgttcgaggatgcgcctgagacggagtccttggcctacagattttcccagtatctgagatatgtcttgagaagacagtccagagaggagctggttccccttgccggagaggtggagtgcgtcgaacattttctctctataaacaagataaggttcagcgaccggttcgacttcgatctccacgtcggtcccggaaccagggacgtgagggtacccttcatgatattgcagcctctggtcgagaacgccatagtgcacggagtggaaccctcgactgaccgatgccacctttccgtcgaggcctccatagaagaaggttcccttgtggtcaccgtttccgacgacggagtaggattcgattgttccaatttctcacccggagtcggggtgtcgaacgtcatggaaaggttggatcttcactatgggaaagatggatgtctccgttggtcctcctgtcccggtgatggaagtagattcgaggttaccatgcctttgagacgaggggaggagatgacgggatga

SEQ ID NO: 484 - protein, 408 aa, Dethiosulfovibrio peptidovorans SEBR 4207, DSM 11002"
VEELEYGSLEWWHQTVNIGVLQEILDRFAQILNCGAVLTTALGVPITTPSNFTRFCRLMRSTEEGRRLCWESDAAGGRAGLEQGKVRIYRCHAGLIDMALPVVIEGRLAGVVLCGQVKLRHYTRQEVEELAGVGWQNLSNRDELVDLFMEAPVVPREVIDQGGELIKLVSSHVVELCERRLAEKKLLVKDLVLMREKCDKQSLERNLKISQIKALRHQLNPHFMFNTLNAIVRLAMFEDAPETESLAYRFSQYLRYVLRRQSREELVPLAGEVECVEHFLSINKIRFSDRFDFDLHVGPGTRDVRVPFMILQPLVENAIVHGVEPSTDRCHLSVEASIEEGSLVVTVSDDGVGFDCSNFSPGVGVSNVMERLDLHYGKDGCLRWSSCPGDGSRFEVTMPLRRGEEMTG

SEQ ID NO: 485 - DNA, 1569 bp, Dethiosulfovibrio peptidovorans SEBR 4207, DSM 11002"
atgacgggagatatcttcaaggtcctggtggtggaggacgagcctcttgaacggaaggctctgtcgattctcctggagaggatgaaggaccctctcgagataaaatcggtcggaaccgcccccgagttcgaggaactctgcggggcctgggatcccgatgtcgtccttctcgacatacacataccgggaggggacggtttaagctctctcaaaaggctcaaggaagacggttttctaggggacgtcgtgttgatcacggcttacgacgtgtttcaatacgcccagaacgccatgggactgggggtcaagtcctttttggtaaaacccgtcacgggggagcgtctccaggaagagctcgacagggtcttgcgggacgtcagggaaagacggctcagaactctggagatagatcagcttaagaccttcataaagaacaacagaggctcattggcccttaggatgatacaggatctgcttcgttccggtcaggtaagcgagggaatgatggacgtcatggccagcctaagattgcccccttccagaccatgtcaccttttcggggtgatctccgtggcgagcgagagagggcttggaaccgactcgctcttcctgtgggacgatttcgacaaggctctgggagaggaggtagtgacggtcccgtgggacgggtctctgtccttttttctggtgaccttcgaggaggcgttgtcggacgtcgaccgttggctttcccgtttccttgaggtaatacttagaaacgacgcaatggcgaacgtggcttacggaggacttatagaccgactggaatcgatcccctccgccgttaccaggttggaagaggccctcgaagagagtttgctggaagggatggggagggccgtcatggtggagaacagcgtggacgaccctcctacgccggattacgatttcgatctggagactgtgcagcagcagtctgtggaggcttttctgaacaatagaccggatcttctctcttccgtcaaggaaagcttggatgtgttgataagcaactcgtccccttcggatctcaacatggtcaagttcatggtgacaggtcttttaggacaggtatgtcatgtcttgcttcggctgaaatgtgatgccggagcggtggctggatggagcaggcggcagatgcttaatctcatatcgatacagactcccatggctcttaccaaagctcttccggaggccttcgatcaggcctggacagtgagggaatccgccagcgatcctacggtcataatggttcagcaggcgttacactatatagaggccaactacgacgacgttacccttgagagggtggccgacgcagtacacgtcagtcccagttatctgagcaggaccttcagacgggttcttggggatcgtttcgtcgacaaggtaaaatcggtgaggatggatcgagccaaagccctcttatccgacggagtctccgtcagagacgtggccatctcggtggggtacggcaacatcgcctatttcagcaccatctttaagcagtcgaccgggtgtagccccagcgattacaggaaaaaaaactga

SEQ ID NO: 486 - protein, 522 aa, Dethiosulfovibrio peptidovorans SEBR 4207, DSM 11002"
MTGDIFKVLVVEDEPLERKALSILLERMKDPLEIKSVGTAPEFEELCGAWDPDVVLLDIHIPGGDGLSSLKRLKEDGFLGDVVLITAYDVFQYAQNAMGLGVKSFLVKPVTGERLQEELDRVLRDVRERRLRTLEIDQLKTFIKNNRGSLALRMIQDLLRSGQVSEGMMDVMASLRLPPSRPCHLFGVISVASERGLGTDSLFLWDDFDKALGEEVVTVPWDGSLSFFLVTFEEALSDVDRWLSRFLEVILRNDAMANVAYGGLIDRLESIPSAVTRLEEALEESLLEGMGRAVMVENSVDDPPTPDYDFDLETVQQQSVEAFLNNRPDLLSSVKESLDVLISNSSPSDLNMVKFMVTGLLGQVCHVLLRLKCDAGAVAGWSRRQMLNLISIQTPMALTKALPEAFDQAWTVRESASDPTVIMVQQALHYIEANYDDVTLERVADAVHVSPSYLSRTFRRVLGDRFVDKVKSVRMDRAKALLSDGVSVRDVAISVGYGNIAYFSTIFKQSTGCSPSDYRKKN

SEQ ID NO: 487 - DNA, 348 bp, Dethiosulfovibrio peptidovorans SEBR 4207, DSM 11002"
gtgtccgaatcgggcaagttaccccgttccattcaagagttcgtgccgggaaaacagatcactttggctcacgtggtcaggaatcccagatccaatctctgcgaacgcataggagtcgacagaggaggagccctgggattgatgaccataactccaggggagggctccatcatagcggcagatgtcgcgtcgaaagcggcggtcgtcgaggtcgagttcgtggacaggttcaccggttgcgtgatgatatccggtgagatatctgcggtcgagagcgccctatccagtgccgtatcggtcctcagggacgccttgggatttactcccgccgaggtcacgaggacatga

SEQ ID NO: 488 - protein, 115 aa, Dethiosulfovibrio peptidovorans SEBR 4207, DSM 11002"
VSESGKLPRSIQEFVPGKQITLAHVVRNPRSNLCERIGVDRGGALGLMTITPGEGSIIAADVASKAAVVEVEFVDRFTGCVMISGEISAVESALSSAVSVLRDALGFTPAEVTRT

SEQ ID NO: 489 - DNA, 489 bp, Dethiosulfovibrio peptidovorans SEBR 4207, DSM 11002"
atgagtcgaccatggcgggttatggtcatcggttccgtcgattccggcaagaccacccttttgggagtcctttccgataaggcggttaggacggtaaagaccgagtccatcgatttttgcggcgatttcgttgacacgcccggggagtttctggacatccctctacattacaactccctgatatccacatcctccaaggcatcggtcgtgctgttgttggtggatcccaccaggaattgtccccctcctccgacgttttcgagcgtgatatgcgccccgatcgtgggagttgtcaccaagtccgatctggcgtcttcggagcagatcgagagggcgaagaagtcgcttcgtcgaagcggagtgagggagagctgtgtcatctcctccgtcacaggggagggattggagtttttgaagtccacgatggaaaggtatcgaccgacctcttatgaggacggaaagctaaaacaggaggtgtcatcggaatga

SEQ ID NO: 490 - protein, 162 aa, Dethiosulfovibrio peptidovorans SEBR 4207, DSM 11002"
MSRPWRVMVIGSVDSGKTTLLGVLSDKAVRTVKTESIDFCGDFVDTPGEFLDIPLHYNSLISTSSKASVVLLLVDPTRNCPPPPTFSSVICAPIVGVVTKSDLASSEQIERAKKSLRRSGVRESCVISSVTGEGLEFLKSTMERYRPTSYEDGKLKQEVSSE

SEQ ID NO: 491 - DNA, 282 bp, Dethiosulfovibrio peptidovorans SEBR 4207, DSM 11002"
atgaatgcagaagcgttgggcatggtcgagaccagaggattggtaggagttatagaggctgccgatgccatggtcaaggcggctaacgtccgtctcgccggatacgaaaagatagggtcgggctacgtgaccgttatggtgagaggcgacgtcggggccgtcaaggctgccgtcgacgccggagccgcggcggccaagcgggtcggagaggtcgtctccattcacgtgattcccaggcctcattcggataccgagaggatcctgcccaagatagagggctag

SEQ ID NO: 492 - protein, 93 aa, Dethiosulfovibrio peptidovorans SEBR 4207, DSM 11002"
MNAEALGMVETRGLVGVIEAADAMVKAANVRLAGYEKIGSGYVTVMVRGDVGAVKAAVDAGAAAAKRVGEVVSIHVIPRPHSDTERILPKIEG

SEQ ID NO: 493 - DNA, 822 bp, Dethiosulfovibrio peptidovorans SEBR 4207, DSM 11002"
atggaacaggatgtaatgaagaaggttatggacgaggttatgaaaaggcttggagagggtgccgctcctgccgccgctcccgctcaggagagcaaggcagtcgaggagagttgcggttcgttctgctctccctccgttggggtcaccgagttcgtcggtcttgccagaggacacaccatcggtctggttatcgcaaatgtcgagagctcccttcatgaaaagctcgggatcgatcccaagtacaggtccatcggaatcatctccgatcgcatcggggccggacctcagataatggcggccgacgaggccgtaaaggccaccaacaccgagatcgtcgctctcgaactatgcagggacaccgagggaggggccggacacggatgcctgatccttttcggggcggaggacgtatcggacgcccgtagggccgtcgaggtcgccctgaaagacctggatcgcactttcggcgacgtctacggatgtgcggccggtcacctcgagtttcagtataccgccagggccagcgacgctctcaacaaggcgttcggagcccctgtcggaagggccttcggtctcatagtcggagctcctgccggaatcggctttgtgatgagcgacaccgctctcaaggctgccgaggtagagcttctggcctacagttctcccggccagggcacctgctggaccaacgagtgtatcatcgcattcaccggggactccggtgccgtccgtcaggcgatcatagccgccagagagatgggacagaaacttctcggggctttcggagaggcacctgcgaccgacaccactccctacatttaa

SEQ ID NO: 494 - protein, 273 aa, Dethiosulfovibrio peptidovorans SEBR 4207, DSM 11002"
MEQDVMKKVMDEVMKRLGEGAAPAAAPAQESKAVEESCGSFCSPSVGVTEFVGLARGHTIGLVIANVESSLHEKLGIDPKYRSIGIISDRIGAGPQIMAADEAVKATNTEIVALELCRDTEGGAGHGCLILFGAEDVSDARRAVEVALKDLDRTFGDVYGCAAGHLEFQYTARASDALNKAFGAPVGRAFGLIVGAPAGIGFVMSDTALKAAEVELLAYSSPGQGTCWTNECIIAFTGDSGAVRQAIIAAREMGQKLLGAFGEAPATDTTPYI

SEQ ID NO: 495 - DNA, 1671 bp, Dethiosulfovibrio peptidovorans SEBR 4207, DSM 11002"
atggcagataaaagaagcaagagattcgagatcctggagaaccgcccggttcatcaggacggattcatcggagagtgggtagacgtcggcctcatagccatggatagtcccaacgaccccaagccctcggtggtggtaagggacggtctgatagtcgagatggacggacgtccccgtaaggaattcgacatgatagagcagttcgtggcggactattgcatagatcggtccgtcgcccaggaggccatgtccaagtcctctctggagctggccaggatgttggtggatatatcggtctctgccaaggaggtccgcagggttttctcaggacttacccctgcgaagatggccgacgttatcggtcagatgaacatcgtcgagataatgatggcaatgcagaagatgagggctcgtcagactccgggcaaccaggcccatatcaccagtgctacggacaaccccatcatgctctgtgccgacgcggcggagggagccctgagagggttcatggaggaggagaccaccgtggcggtagcacgctatgcggctctcaacgctatttcccttctggtcggatcccagacaggacgtcccggcgttctaacacaggacgctctggaagaggccttcgagctccagatcggaatgcagggactgaccagctatgccgagaccgtctcggtctacggtacggagagcgtcttcgtggacggagacgacaccccatggtccaaggccttcctagcctccgcctacgccagtcgaggaataaagatgcgattcaccagcggaactggtagcgaggtccagatgggtgcggcagagggacggagcatgctttatctggaggcccggtgcatcatggtcaccaaaggtgccggcgttcagggacttcagaacggatcgatatcctgtatcggggttcccggagccgttcccagcggtcttagggccgtggcgggagagaacctcataaccatgatatacggtctcgaggtcgcttccggaaacgaccagaccttctcccattcggacatgcgtcgtaccgctaggacaattcctcagatgttctccggtgcggatttcatcttctccgggtattcgggcgttcccaacaaggacaatatgttcgccggctccaattgggacatagaggacgtcgacgactatcttacccttcagagagacttccgtgtcgatggaggactcatccccgtaacggaggacgaggtcgtggcctgccgtaacaaggcggccagagcccttcaggcggtttacgacgagctgggattccctgccatctcggacgaggaaatcgaggcggccacctacggtcactccagttcggacatgccccccagaaacatccccgaggacctcaaggcagcagagagggtcatgaccgagatgatcaacggtatcgacatcataaaggccctttccaagagaggattccgagaggaagccgaggccctggtcaggatgatgaaacaacacgtctcaggagactatctccagacctcggcctgggtcgatagggaaggcggggtctggagtgccgtaaacgacccgaactcctaccagggacccggcacgggatattccatgtcggaggagcgttggaaccagcttaagaacgtgccctgggccataaaggccgaggacgtttaa

SEQ ID NO: 496 - protein, 556 aa, Dethiosulfovibrio peptidovorans SEBR 4207, DSM 11002"
MADKRSKRFEILENRPVHQDGFIGEWVDVGLIAMDSPNDPKPSVVVRDGLIVEMDGRPRKEFDMIEQFVADYCIDRSVAQEAMSKSSLELARMLVDISVSAKEVRRVFSGLTPAKMADVIGQMNIVEIMMAMQKMRARQTPGNQAHITSATDNPIMLCADAAEGALRGFMEEETTVAVARYAALNAISLLVGSQTGRPGVLTQDALEEAFELQIGMQGLTSYAETVSVYGTESVFVDGDDTPWSKAFLASAYASRGIKMRFTSGTGSEVQMGAAEGRSMLYLEARCIMVTKGAGVQGLQNGSISCIGVPGAVPSGLRAVAGENLITMIYGLEVASGNDQTFSHSDMRRTARTIPQMFSGADFIFSGYSGVPNKDNMFAGSNWDIEDVDDYLTLQRDFRVDGGLIPVTEDEVVACRNKAARALQAVYDELGFPAISDEEIEAATYGHSSSDMPPRNIPEDLKAAERVMTEMINGIDIIKALSKRGFREEAEALVRMMKQHVSGDYLQTSAWVDREGGVWSAVNDPNSYQGPGTGYSMSEERWNQLKNVPWAIKAEDV

SEQ ID NO: 497 - DNA, 672 bp, Dethiosulfovibrio peptidovorans SEBR 4207, DSM 11002"
atgataaacgaagaattggtccgtaaagtcatagccgaggtcctgcaggaggtcgctgcctcggagaacgtggagtctgcctccgtcacggcaagaccgtccgctcccgccgtaaaggccgaaatctccatggagatgaccgaaaaagagagggctacccgtggcacagatgccagagaggttgtagtggccatacctcccgcattcggaaccgaattcgacgccaccatcgtggatgtctccctggcagacgtgctccgtcaggtctttgccggaatagaggagcagggcctttcctggagactcgtcagggtctatcacaccgcagacgtggcgttcatcgcccatcaggcggcgaaactctccgggtcgggagtcggtatagggatcatatccagaggtacgaccgtcatacatcagagagacctggcccctctcaacaacctggagctgttccctcagtctcccctattggatctggagaccttcagagccataggcagaaacgccggcatgtacgccaagggagagcagccggtgccggtggctactaaaaacgatcctatggccaggcctaaattccagggaatagccgcattgctgcacaacaaggaagtcaaggcactggatcgctccaagtctcccatggagcttcaggtccggttcaggtag

SEQ ID NO: 498 - protein, 223 aa, Dethiosulfovibrio peptidovorans SEBR 4207, DSM 11002"
MINEELVRKVIAEVLQEVAASENVESASVTARPSAPAVKAEISMEMTEKERATRGTDAREVVVAIPPAFGTEFDATIVDVSLADVLRQVFAGIEEQGLSWRLVRVYHTADVAFIAHQAAKLSGSGVGIGIISRGTTVIHQRDLAPLNNLELFPQSPLLDLETFRAIGRNAGMYAKGEQPVPVATKNDPMARPKFQGIAALLHNKEVKALDRSKSPMELQVRFR

SEQ ID NO: 499 - DNA, 540 bp, Dethiosulfovibrio peptidovorans SEBR 4207, DSM 11002"
gtggagatcaacgagaagcttatagccgagatggtccgtcaggtcctacagagtggaggaaaccaggaaaaaggggcgtctaattcgcctcaggaaacttccgtaaaagaccgaaaggtattgtccaagaacgattaccctttagcggttaaaaggccggagcttttggtcgggcccagaggcaaggggttcgacgagctgaccttgtccaatatagagagcggaaatgtggccttcgaggacttcaaaataacccccgatgccctggaatatcaggctcagatagccgaggacgacggatgccatcagatagccgtcaatcttcgcagggccgcggagctaaccaaggtcccagattccagggtgttggagatatacaacgccatgagaccccatagatccacgaagtccgatcttttgggaatagccgacgagctggagaagaactacggtgctatggtatgtgccgagcttcttcgggagaccgccgacgtatacgaacgcagaaagcttctcaaaggcgatctgcctaccggatag

SEQ ID NO: 500 - protein, 179 aa, Dethiosulfovibrio peptidovorans SEBR 4207, DSM 11002"
VEINEKLIAEMVRQVLQSGGNQEKGASNSPQETSVKDRKVLSKNDYPLAVKRPELLVGPRGKGFDELTLSNIESGNVAFEDFKITPDALEYQAQIAEDDGCHQIAVNLRRAAELTKVPDSRVLEIYNAMRPHRSTKSDLLGIADELEKNYGAMVCAELLRETADVYERRKLLKGDLPTG

SEQ ID NO: 501 - DNA, 1833 bp, Dethiosulfovibrio peptidovorans SEBR 4207, DSM 11002"
atggcgatcgtcgctggtatcgatatagggaactccacgaccgaggtcgccttggcggaggtgtcgtcgggggacggtaagaccttcctagcctccgctctgcatccgactacgggactcaagggaacggtccagaatctgagaggcataaggttggccttgggcaaggccattgaagccgctggttgggatagaggggattttggcaaggtagacctgattcgacttaacgaggcggctccggtcataggggacgtcgccatggagacggtcactgagactgtcatcaccgagtccaccatgataggtcataacccctcgactcctggaggtctcggaataggcgtaggggtgactgtggcctacgatgatctgcggaaccaggctagggacgagtccgtagtagtagtcattccgggctccatcgatttcgaggccgcagctggggctgtcaacgaggctatcgatagaggcgtaaatgtcaaggctctgatatgtcagaacgacgacggagtgttgatatccaacaggctgagtcggcctctccctatagtggacgaggtctctgcaatagacaagattcctctcggcatggacagttgcgtggaggtagccggtcccgggagggtaatagaggtgcttgccaacccctacgatgtggccaccatcttcggtttgtctcccgaagagaccaaacagatagttcctgtgaccagagccttggtgggaaatcgatccgcggtggtcataaggactcccatgggagaggtgaaggaaaggtctatccctgccggagagatatccatagattcgcctaacggcagaaaaaacgtggacgtcgaggccggggctgaggccataatgaacctcctatctgtctgtcaccctattacggatatcttcggtcagcccggcaccaacgtcggagggatgatggagagggtccgtaccactatggcgaagttgaccgggctgtcgatagcagagatccacatacaggatctcctggccgtcgataccatggtccctcaaaaggtcgtaggaggtctggccggagaattttcccaggagaacggggtggctctggctgtcatggttaagaccgccaagcttccgatgcaggcggtcgcggaggctgtatcggaggacatagggataaaggtcgagataggcggggtagaggccgacatggccatcagaggcgccttgacgacccccggaaccgatcgccctatcgccatcctcgatctcggagccggcagttccgacgcctctttcatgaagtacgacggatcggtcgagctgattcatctggcaggcgcgggaaacatggtcaacaccgtcatatgcagtgagttggggatcgaagatcccgagctggccgagtcgataaagagatatccgctgtgcaaggtggaaagcgcctatcacgtcaggcaggaggacggcacggtccgctttttcgatagacctcttgctccggaccttttcgggagagtcgctctggctatatcggacgatatcctacagcccattcccctaagagtctccatggaaaaggttcggatggtcaggagaaaggccaagaaagaggtcttcgtgaccaatgccttgagggcgttggagcatgtggctcccgccgggaacgtaaggatgatagatcacgtggtcctggtgggtgggtcggccaaggatttcgagatccccaccatggtaaccgatgccctggccagatatggggtggtctcaggcagaggtaacgttcgaggttcggaaggtccgagaaacgccgtcgccaccggactggtcctctcatacagaggtacgtcatga

SEQ ID NO: 502 - protein, 610 aa, Dethiosulfovibrio peptidovorans SEBR 4207, DSM 11002"
MAIVAGIDIGNSTTEVALAEVSSGDGKTFLASALHPTTGLKGTVQNLRGIRLALGKAIEAAGWDRGDFGKVDLIRLNEAAPVIGDVAMETVTETVITESTMIGHNPSTPGGLGIGVGVTVAYDDLRNQARDESVVVVIPGSIDFEAAAGAVNEAIDRGVNVKALICQNDDGVLISNRLSRPLPIVDEVSAIDKIPLGMDSCVEVAGPGRVIEVLANPYDVATIFGLSPEETKQIVPVTRALVGNRSAVVIRTPMGEVKERSIPAGEISIDSPNGRKNVDVEAGAEAIMNLLSVCHPITDIFGQPGTNVGGMMERVRTTMAKLTGLSIAEIHIQDLLAVDTMVPQKVVGGLAGEFSQENGVALAVMVKTAKLPMQAVAEAVSEDIGIKVEIGGVEADMAIRGALTTPGTDRPIAILDLGAGSSDASFMKYDGSVELIHLAGAGNMVNTVICSELGIEDPELAESIKRYPLCKVESAYHVRQEDGTVRFFDRPLAPDLFGRVALAISDDILQPIPLRVSMEKVRMVRRKAKKEVFVTNALRALEHVAPAGNVRMIDHVVLVGGSAKDFEIPTMVTDALARYGVVSGRGNVRGSEGPRNAVATGLVLSYRGTS

SEQ ID NO: 503 - DNA, 471 bp, Dethiosulfovibrio peptidovorans SEBR 4207, DSM 11002"
atgacgtcctgtttgaggatagatgaggacgacaggcccgcgatccacctttacgtgtctcccgagacggaggaatccgccgtttctctggtggcggccggagcggaagaggagggaatacccctccgttggatcttcggaaagggatcggcctcggatctggccaaagagggcagtctgtcttctcctcttcaggttggggcggggctggattctcagggagtagcggtgaccttcgcaacctacagagagcgaagagcttatctggaggagagtttcgaggagttcgataggtcgctgctcctccgatggctgggacaggccgcggccagattcgtgaaaaaagagcctctgccggagtggagatgcaggtcgaaccgggaatcgaaccgatccggcgaggatggaatcgaagccattgtggctcaggtattgaagagccttaagaggacggaggcgatgcaccgatga

SEQ ID NO: 504 - protein, 156 aa, Dethiosulfovibrio peptidovorans SEBR 4207, DSM 11002"
MTSCLRIDEDDRPAIHLYVSPETEESAVSLVAAGAEEEGIPLRWIFGKGSASDLAKEGSLSSPLQVGAGLDSQGVAVTFATYRERRAYLEESFEEFDRSLLLRWLGQAAARFVKKEPLPEWRCRSNRESNRSGEDGIEAIVAQVLKSLKRTEAMHR

SEQ ID NO: 505 - DNA, 762 bp, Dethiosulfovibrio peptidovorans SEBR 4207, DSM 11002"
atgaacgaacctagaacggctatggggtttatcgaaaccgtcggtctcgttgcggccatcgctgcggccgacgaggcccttaagagcgccaacgtgaaattgatcggcagagagaattccagaggagacggcatggtcacggtgaagatcgccggagacgtcggagcggtcaaggcggccatatcggcggcgaaggctgcggtaaagccctttggaactgtcgtgtccgctcaggtaatccctcgtcctgctgtcgggttcggaccggtgatggtctataacgacgataccgaatcggcggcggactggctctttgaggtggctcccgatgaaactaccggtaaggtcgtgactgtcaatggaactccctcgataggggaaaaagaccgatgggaggcggacatggaaaaggcctctcaaagaaagacgaaaggacgcagaaaggcgagtagtcgtaaaaaatctagctcctctaaagaaggggcatccaaggaaccccaacagggtaaacccggtggaagaaggcgcaggaaaacctcttccaacaaaggaacggtgaagaccgacgtccccgattcaatcgaaaatgaaatggaagaaaataaggccgagataaaaaaggttgaggaaccgccaaagaagcaggctaattccgattctgagaagaactccaagacggaagtcggtaagtctagtaagacggagaacgagaaaattcaggataaaacatccgacgacgcctccgggcccgtcgaaggataa

SEQ ID NO: 506 - protein, 253 aa, Dethiosulfovibrio peptidovorans SEBR 4207, DSM 11002"
MNEPRTAMGFIETVGLVAAIAAADEALKSANVKLIGRENSRGDGMVTVKIAGDVGAVKAAISAAKAAVKPFGTVVSAQVIPRPAVGFGPVMVYNDDTESAADWLFEVAPDETTGKVVTVNGTPSIGEKDRWEADMEKASQRKTKGRRKASSRKKSSSSKEGASKEPQQGKPGGRRRRKTSSNKGTVKTDVPDSIENEMEENKAEIKKVEEPPKKQANSDSEKNSKTEVGKSSKTENEKIQDKTSDDASGPVEG

SEQ ID NO: 507 - DNA, 306 bp, Dethiosulfovibrio peptidovorans SEBR 4207, DSM 11002"
atgggacaggaagcattgggattgatcgagactagagggctcgtagcagctatagagggagcggacgcgatggtcaaggcagccaacgtcgcactaataggccagaggctcagcggagccggattggtgaccgtaatggtacgaggcgatgtaggggcggtaaaagctgcggtagatgccggttgcgccgcggctagcagagtcggagaagtcgtctccactcacgtgattcccaggcctcacatggatacggagaagatccttccagccggaggagtagataccctctccgcatcgaacgactag

SEQ ID NO: 508 - protein, 101 aa, Dethiosulfovibrio peptidovorans SEBR 4207, DSM 11002"
MGQEALGLIETRGLVAAIEGADAMVKAANVALIGQRLSGAGLVTVMVRGDVGAVKAAVDAGCAAASRVGEVVSTHVIPRPHMDTEKILPAGGVDTLSASND

SEQ ID NO: 509 - DNA, 654 bp, Dethiosulfovibrio peptidovorans SEBR 4207, DSM 11002"
atggcgatttcgagagagctggtggacaaaatagtgagcgagatcctccagagcttgcccgagtcgcgtgtcgagcatgatccggctctcgtagtggccggggtcagcaatcgccacgttcatctttccaggaaagacggcgataggcttttcggttccggtcatgagcttactcccatcaaggatctacgtcagcccggacagttcgcctgcaaggaaacggttaccttggccacagcaggaggggttttggaatcggtgcgtgtccttggcccctaccgtaaggctactcaggtggagatctccgcgtccgacgccaggcggctcaggatcaaggctcccttggtaaaaagcggatccgaccttccctgtgatcccgtcacgctaattggacccgccggttccatgacggtagaagtcggggtgggcatagcctggagacatctgcatctcactcctcccagggcggcggaactatccctgaaggatgggcaggaagtgtctgtggaggtgccgggagacagagggatcgttttcaaccgcgtctgggtgagggtcagcgattctatggaggtagagtttcacgtggacgtggacgaagctaattcctgcggcctttccaccggcgatatggtcagggtactcggatcatga

SEQ ID NO: 510 - protein, 217 aa, Dethiosulfovibrio peptidovorans SEBR 4207, DSM 11002"
MAISRELVDKIVSEILQSLPESRVEHDPALVVAGVSNRHVHLSRKDGDRLFGSGHELTPIKDLRQPGQFACKETVTLATAGGVLESVRVLGPYRKATQVEISASDARRLRIKAPLVKSGSDLPCDPVTLIGPAGSMTVEVGVGIAWRHLHLTPPRAAELSLKDGQEVSVEVPGDRGIVFNRVWVRVSDSMEVEFHVDVDEANSCGLSTGDMVRVLGS

SEQ ID NO: 511 - DNA, 435 bp, Dethiosulfovibrio peptidovorans SEBR 4207, DSM 11002"
atgacctcttggcttacccccgaactctctctttgcggacaggtctttcgagaagggacggcagaaggagaaacccccgggaatatctgtctcggcttcgatctgggaaccaccaatatggtactggtggccttggacgaggagggctttccgataggagcggttatggagccctctaaagcctccgtcagagacggagtcgtggtcgattatctcgaggcgatcagaggaatgaaggtctgtctcgaccggctttcgagggggatccccatcgacgaatccattgcggtgggagccgccgcttaccctcctgggatatcctctaaaaccgccaggtctgtgccaacgtggtggaagctttgggattcgagtgtggagggctgtacgaggagccctccgccgcggcagaggcgttgggcatggccgacggtgtga

SEQ ID NO: 512 - protein, 144 aa, Dethiosulfovibrio peptidovorans SEBR 4207, DSM 11002"
MTSWLTPELSLCGQVFREGTAEGETPGNICLGFDLGTTNMVLVALDEEGFPIGAVMEPSKASVRDGVVVDYLEAIRGMKVCLDRLSRGIPIDESIAVGAAAYPPGISSKTARSVPTWWKLWDSSVEGCTRSPPPRQRRWAWPTV

SEQ ID NO: 513 - DNA, 432 bp, Dethiosulfovibrio peptidovorans SEBR 4207, DSM 11002"
atggccgacggtgtgatcgtcgacataggcggaggatctacaggcatgtccgtcgtgagggatgaaaaagtgatattctcctccgacgaacctactgggggtacccatatgacacttgttctggctggagccttgggcgtcgatttcgacagggcagaggaggaaaagagaaaaaacaggaatagatatgcccctcttttgaaacccgtactcgagaagatggcgaccatagtcagggacgaactggagggatgtcccgagtcggatggacttccggtagtcctggtaggggggggagccgacatcgtcggagtggagggcgtgatggaatcgataataggccgtcccgtatccatggcccccgaaagtcttttggttacgccgctggggatcgcccgttctctctggagggaccgttatggatctaaataa

SEQ ID NO: 514 - protein, 143 aa, Dethiosulfovibrio peptidovorans SEBR 4207, DSM 11002"
MADGVIVDIGGGSTGMSVVRDEKVIFSSDEPTGGTHMTLVLAGALGVDFDRAEEEKRKNRNRYAPLLKPVLEKMATIVRDELEGCPESDGLPVVLVGGGADIVGVEGVMESIIGRPVSMAPESLLVTPLGIARSLWRDRYGSK

SEQ ID NO: 515 - DNA, 645 bp, Dethiosulfovibrio peptidovorans SEBR 4207, DSM 11002"
atggatctaaataaaacggttgacatggtactgaagaagctgtcgattcccagaataggggtcctgtggcattccagatcccgctgggagggcgatcgtggctttgtggactgggtccattatgtcgatggaggcccgggccctgccgatccctggtacgacctgaattcaatggacagaccggaaaacgaggggtattccctcgacggcctaatggtcctatcagctccaccctctcttttgagggagttggtgacctttcccgagacctccggtgggagactcatagccggatgtctgggaagaaatctgccggtggtgctggatgtcacctctctcaggggatggagcgcctggcagggcccaatgggagagagactggcgagggccatgtcagatttgacttttttgggatgttctctcgtcggctggggagccgactcggtgaaagactccggtcttacggataaaagggacgagggagtagccctgtcagatcccggctggtacagctggtccgagatagcttcgtcggtgaggcctggagcggttttgcatttggggagtggcgtaaaacttaccgatcaggccaaggataggctgtccgccataggcgtgaccctggaggtgagccgacgttgttga

SEQ ID NO: 516 - protein, 214 aa, Dethiosulfovibrio peptidovorans SEBR 4207, DSM 11002"
MDLNKTVDMVLKKLSIPRIGVLWHSRSRWEGDRGFVDWVHYVDGGPGPADPWYDLNSMDRPENEGYSLDGLMVLSAPPSLLRELVTFPETSGGRLIAGCLGRNLPVVLDVTSLRGWSAWQGPMGERLARAMSDLTFLGCSLVGWGADSVKDSGLTDKRDEGVALSDPGWYSWSEIASSVRPGAVLHLGSGVKLTDQAKDRLSAIGVTLEVSRRC

SEQ ID NO: 517 - DNA, 90 bp, Dethiosulfovibrio peptidovorans SEBR 4207, DSM 11002"
ttgttgagctacgagcttatagtcaagccgtcagatacggccaagaggatgatgttaagacgggtcccgtccagcgagaaaaaaggatag

SEQ ID NO: 518 - protein, 29 aa, Dethiosulfovibrio peptidovorans SEBR 4207, DSM 11002"
LLSYELIVKPSDTAKRMMLRRVPSSEKKG

SEQ ID NO: 519 - DNA, 150 bp, Dethiosulfovibrio peptidovorans SEBR 4207, DSM 11002"
gtggacgacggggttaaaagggcctccgttgaagccgtggagatcctgggtaactgtccgcaacacatacagaccgtcgcccttatcggaggggtctccgagtgtcgtgcgtcccttgacggactgaaggaagggggacgactgaaatga

SEQ ID NO: 520 - protein, 49 aa, Dethiosulfovibrio peptidovorans SEBR 4207, DSM 11002"
VDDGVKRASVEAVEILGNCPQHIQTVALIGGVSECRASLDGLKEGGRLK

SEQ ID NO: 521 - DNA, 303 bp, Dethiosulfovibrio peptidovorans SEBR 4207, DSM 11002"
atgaaattgggcagggtcgtaggcaacgtggtagctaccagaaaagacgatcgacttatcggacataaacttctgatagttcgtctcctctcccccaagggggacggcgatctaggcccttctgtcaagggagaaaactttattatagcggtcgatatggttggtgccggcataggagaggacgtaatagtctgttccggtagctctgctgctaaatcctccggtgttccggatgctcctatcgacggcgctatagtcggtatcgtcgattctgccgacgtggacccaagagaggtcggttag

SEQ ID NO: 522 - protein, 100 aa, Dethiosulfovibrio peptidovorans SEBR 4207, DSM 11002"
MKLGRVVGNVVATRKDDRLIGHKLLIVRLLSPKGDGDLGPSVKGENFIIAVDMVGAGIGEDVIVCSGSSAAKSSGVPDAPIDGAIVGIVDSADVDPREVG

SEQ ID NO: 523 - DNA, 969 bp, Dethiosulfovibrio peptidovorans SEBR 4207, DSM 11002"
atgaccagactctacactggaggaggggacggaggcactacgtcgttattggacgggaccagggttcaaaaagacgacccccgaatcgatctcaacgggaccctcgacgaagctcaggcagctataggaatggccaggagcatggctcccgggaggtttttatccgatatggaggagctggaacacacccttttcctcctgatggcctacgtggctcgaggggacagggacatatcgtcgccaccggccgatctgtttgagaaaaagatagacggactcgagagcctttgccctcatgatagatctttcgtcaggccgggaaagtccccttccggtgcagcgcttcatctggcccgcaccatagccagaagggcggagagagaggctctaccgttgcttcgtcgtcatctgatagacgaggactcgtacaggctgataaaccgcctgtcggattacatctttgctttggccgtggcatgcgacgaggaatcggtggtcgaagagatcacccgaaaggtaataaaggagctgataaagatgccttgcaaagatggtgaagatcgcctctcccttaagacggctcttgatctcgtgtcagccgcggaggatagggcgtcgcagatttcggtccctatggctatcaccgtctcggacgaaaagggtcctttggtcttccatagaatggacggagttttgccggtcagtataggactaagcggtaaaaaggccaagacctccctggaactccgtaaaaccacatccgaggtctacgatctggtccagccgggagctccgctgtacggacttcagtccgatcccgatctgtgttgtttcggcggaggcatccctttgacggataaagagggcagagtcgtaggagccgtaggagtcagcggtggatccgtggaagaggatgtcgaggtagcggaggctgtggtatccctttggaaagaaaaggaggttcgatga

SEQ ID NO: 524 - protein, 322 aa, Dethiosulfovibrio peptidovorans SEBR 4207, DSM 11002"
MTRLYTGGGDGGTTSLLDGTRVQKDDPRIDLNGTLDEAQAAIGMARSMAPGRFLSDMEELEHTLFLLMAYVARGDRDISSPPADLFEKKIDGLESLCPHDRSFVRPGKSPSGAALHLARTIARRAEREALPLLRRHLIDEDSYRLINRLSDYIFALAVACDEESVVEEITRKVIKELIKMPCKDGEDRLSLKTALDLVSAAEDRASQISVPMAITVSDEKGPLVFHRMDGVLPVSIGLSGKKAKTSLELRKTTSEVYDLVQPGAPLYGLQSDPDLCCFGGGIPLTDKEGRVVGAVGVSGGSVEEDVEVAEAVVSLWKEKEVR

SEQ ID NO: 525 - DNA, 1407 bp, Dethiosulfovibrio peptidovorans SEBR 4207, DSM 11002"
atgaagccgatggatgagaaaatgcttcatgaactcgtctctgccgtagtgaagaggatatccttcgaggatgtcgtcaaggacggtggattctctccggccttcgagaaagtagacgatgccgtcgagatttccgtgaaggcgcagagaaagtggcagttcgaatattcactggacaagaagaaattaatcatagattctctcaaggcggatcttctccctcaggtggaggaattttcgtctctggccttgaaggatacgggcatggggaacctgaaggacaagataatgaagaaccgtctcgccatagagaagacccccggccccgagttcatccgtacctcctgcaccaccggggacgaaggtctggtgctggaggagcacgctccattcggtgtgatcgcttcgataactccgtccaccaatccgaccgcctcggtcataaataacacgatctgtatgctctccgccgggaacagcgtcgtgttcgccccgcatcctggagctgccgagagcagcatcgatatggtccagcgagtacacgactccttgatctcccacggcgctcccgagggcataatcacggtgttatcccgcatcagcatgaagaacgtcggagccctcatgtcccatcctgcggttcgtctggtatcggctacgggaggtcccggcgtagtcaacgcagccctctcctcaggaaagcccgccgtaggagccggcccggggaatcctccggtggtggtggacgagaccgctcacgttgaacaagcgggcaaggatatagtggcggggtgttccttcgacaacaatcttccctgtacatccgagaaggccctgatagtggtcaactgcgtcgccgatcagcttaagagaaagatgctggaggaaggtgccttcgagctgaaggacccggcgaagatagaggctcttaaagaggcggccctcaacgaaaaacgaaccgatcccaacaaaaagttcgtaggcaaagacgcggtgtggatcttggaaaaaatcggcataaaggcgcctgggaacgtcagactcatcctcgtagaatgcgagctggacgatcccataatccaggtcgagatgctgatgcccgtcctcgggatggtgagagttcccgatttcgatgcggctctcgaggctgctataaaaacggagcacggtttcaggcattctgccctgatccacagcaccaacgtcgatcatatgagcgttatggccaaggtcatggagactaccatgttcactaagaacggtccttccttctctactttgggcttcggcggcgagtgtcccactgcattcaccatagcaaccaccaccgggcagggaccgaccacccccctttcgttctgtagactgcgcaggtgtaacctccacggttcgtttaggatcgtctga

SEQ ID NO: 526 - protein, 468 aa, Dethiosulfovibrio peptidovorans SEBR 4207, DSM 11002"
MKPMDEKMLHELVSAVVKRISFEDVVKDGGFSPAFEKVDDAVEISVKAQRKWQFEYSLDKKKLIIDSLKADLLPQVEEFSSLALKDTGMGNLKDKIMKNRLAIEKTPGPEFIRTSCTTGDEGLVLEEHAPFGVIASITPSTNPTASVINNTICMLSAGNSVVFAPHPGAAESSIDMVQRVHDSLISHGAPEGIITVLSRISMKNVGALMSHPAVRLVSATGGPGVVNAALSSGKPAVGAGPGNPPVVVDETAHVEQAGKDIVAGCSFDNNLPCTSEKALIVVNCVADQLKRKMLEEGAFELKDPAKIEALKEAALNEKRTDPNKKFVGKDAVWILEKIGIKAPGNVRLILVECELDDPIIQVEMLMPVLGMVRVPDFDAALEAAIKTEHGFRHSALIHSTNVDHMSVMAKVMETTMFTKNGPSFSTLGFGGECPTAFTIATTTGQGPTTPLSFCRLRRCNLHGSFRIV

SEQ ID NO: 527 - DNA, 1329 bp, Dethiosulfovibrio peptidovorans SEBR 4207, DSM 11002"
atgactgcccccaatctactggataagatcctggcggcaggggttgtgggagccggaggtgccggtttccccacccacgtcaagctctcagccgacggcgtacatacgtatctgataaacggagcggaatgcgagccgctattgagaaacaatatggccctattcgacgaaaaaacgccttttctcgtcgaaaccgcccataagatcggatccattcttggcgccgaaagggttaccttctgcgtgaagagaaagcatgtcttccagatagacaaactcaggctggccggggccgatgttttcgagatggacgattattatccggcaggcgacgagataatcatgattcaggaggccactggattgacagttccagaaggaggccttcctcttcaggtcggagtggtggtcaacaacgtggagaccctgtacaacctggggcgagccgtggaagactctcctgtcaccaggacttgggttaccgtcggaggtgccgtcgccaaccccggggtctggtcggttccgataggaactatagcgtcggagcttgttgccctggccggtggggagaccatctcgaatccggtctacgtggacgggggacctatgacgggaacctacagaaagtcggcgaaattccctctaggcaagaggtccaacgggatactggtcgtcccatccgactcggcattggtccgctacgagaccatgccggtggagaccatggtccgtcaggctcggtacgcttgttgccaatgtacccaatgcaccatggtttgttccagaaaccttataggttacgagcttgaacctcacaaggtgatgagagccatggcttatccggagcagaggaccccggagatactgaaaatggctatgctctgttccgattgcaatctgtgtagcggcctccatggttgtcctatgcagttgagtcccagaaggatcaatcaattgctgaaggcctctttcagggagaaaaaggtcaacttctccttcgacaaagccctggatggaccggacgagaacagaccgtatcgactgctaccgagcaagcggctggtaaggcgtataggacttgccagatgggatgtagattgtccctttatgggcgaatacgctcctctccgtgtggatatagcgatggggcagcatataggggctccctgtatcccgatcgtccaggtaggacaggcggtatcggaggggcagaccatcggcgtcgtgccggaaggaggagcgttaggggcgccggttcattcgtcggttaacggatctgtggaatcggttagcgatagctcggtggtcataaaagccaggagggggtga

SEQ ID NO: 528 - protein, 442 aa, Dethiosulfovibrio peptidovorans SEBR 4207, DSM 11002"
MTAPNLLDKILAAGVVGAGGAGFPTHVKLSADGVHTYLINGAECEPLLRNNMALFDEKTPFLVETAHKIGSILGAERVTFCVKRKHVFQIDKLRLAGADVFEMDDYYPAGDEIIMIQEATGLTVPEGGLPLQVGVVVNNVETLYNLGRAVEDSPVTRTWVTVGGAVANPGVWSVPIGTIASELVALAGGETISNPVYVDGGPMTGTYRKSAKFPLGKRSNGILVVPSDSALVRYETMPVETMVRQARYACCQCTQCTMVCSRNLIGYELEPHKVMRAMAYPEQRTPEILKMAMLCSDCNLCSGLHGCPMQLSPRRINQLLKASFREKKVNFSFDKALDGPDENRPYRLLPSKRLVRRIGLARWDVDCPFMGEYAPLRVDIAMGQHIGAPCIPIVQVGQAVSEGQTIGVVPEGGALGAPVHSSVNGSVESVSDSSVVIKARRG

SEQ ID NO: 529 - DNA, 558 bp, Dethiosulfovibrio peptidovorans SEBR 4207, DSM 11002"
atggggttggttttccgtgccattggggccatcgaattgataagcgtggcgaaggggtttttggtggctgacggtatggtcaaatcggcggacgttaagcttctggccgccagaacattatgtcctggaaagtttatcgtcatagtcgccgggcaggtcggggcggtctcgagttcattggagatggggctgtcgatcggaggcgaggcagtttccgatttcacgtccataccgaacgtccatcctgccgtatttccagctcttatgtgttctaccgagttggatacgatgaaagatctaggcgtggtggagaccatgtccgccacttcggcgatagaggccgccgatgccgcagccaaggcgtccaaggtcagcttgatagagataaggatcggtcagggaatgggagccaaggcttttctgtccttttcaggggagatctccgacgtccgttccgccttgaaatcagccagatccgttgtggaggacagaggactcttggtagatgcggtcgtcataagcgcccctgacaggcagttgaaagacgctataaggtaa

SEQ ID NO: 530 - protein, 185 aa, Dethiosulfovibrio peptidovorans SEBR 4207, DSM 11002"
MGLVFRAIGAIELISVAKGFLVADGMVKSADVKLLAARTLCPGKFIVIVAGQVGAVSSSLEMGLSIGGEAVSDFTSIPNVHPAVFPALMCSTELDTMKDLGVVETMSATSAIEAADAAAKASKVSLIEIRIGQGMGAKAFLSFSGEISDVRSALKSARSVVEDRGLLVDAVVISAPDRQLKDAIR

SEQ ID NO: 531 - DNA, 147 bp, Dethiosulfovibrio peptidovorans SEBR 4207, DSM 11002"
gtggagaatctgttcggactggggctatccctggattcctatagttggtcccttcataggagcagggctttcctatgcgatagtcaaggccataggggtagctttcgtaggataggatgtctgacagccctggatatcgggttatag

SEQ ID NO: 532 - protein, 48 aa, Dethiosulfovibrio peptidovorans SEBR 4207, DSM 11002"
VENLFGLGLSLDSYSWSLHRSRAFLCDSQGHRGSFRRIGCLTALDIGL

SEQ ID NO: 533 - DNA, 1104 bp, Dethiosulfovibrio peptidovorans SEBR 4207, DSM 11002"
gtgcagaaaatacttatcgctcccggtaggtacgtccagggagccggcgcttgctcgcagtccggtgctcaggtggcaaagcttggaaagaaggctttggtcatagggggcaagagaggactaggggcagtcgagaagaccatgaaggagagtttcgaggccagcggagtggccttcgtcaaggagtccttcggtggagagtgttgtttcaaggaaatcgacagggtagcttccgtagccaaggataaaggtgccgatttcatcgtcagcgtgggaggcggcaaggcccacgatacgggtaagatggccgctttcaagctgggtatcccggtggttgtggttcccaccatagcggctaccgatgctccatgcagcgctctctccgtggtatattccgaggaaggtgtcttcgagagttatgagtttccacccagtcccgatatggtcatagtggatacggagatagtggctaaggctccgacccgtcttttagtctccgggatgggtgatgctctggccacgtggttcgaggccgaggcctgttacaagaccagagcttctaatatgccaggaggagccgctacggaggcggccatggccctggctaggctctgttacgatcagcttcttgagtatggctacgaggccaagttggcttgtgacgccgatgtcgtgaccccggccttggaacgaatcgttgaggccaataccctgctttccggtatggggttcgaaagcggggggctggcggcggctcacgccatccataacggaatgactgcgatagaggagatgcaccagatgtatcacggagagaaggtcgccttcggaaccctcactcagctggtccttcaggattcccccaaagagattatggaggatgtgctggatttctgctcctccgtagggctcccgatcactctggcccagcttggcttgaaggaccccactcccgaaaagataatggcggctgccgagatggctactgccgaaggggagacgatacacaaccaaccctgcaaggttaccgcatccgatgtcgctaacgccatgatggctgccgacgcccttggacgcagctggcttgccctggataaatcctga

SEQ ID NO: 534 - protein, 367 aa, Dethiosulfovibrio peptidovorans SEBR 4207, DSM 11002"
VQKILIAPGRYVQGAGACSQSGAQVAKLGKKALVIGGKRGLGAVEKTMKESFEASGVAFVKESFGGECCFKEIDRVASVAKDKGADFIVSVGGGKAHDTGKMAAFKLGIPVVVVPTIAATDAPCSALSVVYSEEGVFESYEFPPSPDMVIVDTEIVAKAPTRLLVSGMGDALATWFEAEACYKTRASNMPGGAATEAAMALARLCYDQLLEYGYEAKLACDADVVTPALERIVEANTLLSGMGFESGGLAAAHAIHNGMTAIEEMHQMYHGEKVAFGTLTQLVLQDSPKEIMEDVLDFCSSVGLPITLAQLGLKDPTPEKIMAAAEMATAEGETIHNQPCKVTASDVANAMMAADALGRSWLALDKS

SEQ ID NO: 535 - protein, 750 aa, Blastopirellula marina DSM 3645, unfinished sequence"
TTGGTGCGGTCGCGAGGATTCGCGTCGCTGCCAGATCTGGCTAGTGAACTGGAGGTTTCGGAATCGACGGTCCGGCGTGACCTAGATTCTTTAGAGGACTCTGGTTCGGCCAAGCGGACGCATGGCGGCGTCTTTTACACCGGACCGACGCCCAATCTCCCTCACTTCGAGCTGCGTCAGGAGATGCAGTGGGAGAAGAAGCGGCAAATCGCTCGAGCGGCGAGCGTGCTGATCGAAGATGGCGACACGGTGCTGCTGGATGGCGGAAGCACGACTTACGAGCTGGCTCAGCTATTGGTCGGGCGAACGTTGCAAGTGGTCACCAACTCGCTGCCGGTCGCGAACTTGTTCATGGCCAGCAACACGACCGATTTGATTTTTGTCGGCGGCTACGTTCACAACCGCACCGGCGTTTCGTGTGGACCGTACGCAACCGAGATGATCGCCAAGTTGAATGCTCGGCGGGCGGTGCTCAGCACGGCCGGAATCACCGAGCAAGGTCTCTACAACAGTAACCTGTTGTTGATCGAAACCGAACAAGCGATGGTCCGCGCCGCCGGCGAAGTGATCATCGTCGCCGATAGTACGAAATTCGGACGGCAGAGCCTGGCTCACCAATGTCCGCTGGCTGAAATCGACCGCTTGGTGGTCGATGACCAGATAACGCCGCAGTGGCTGACAGTGCTGCAAGACGCGGGGATCGACACGATCGTCGCTGACAGTACGACGCCGTCGGAAGCTGTACGATAA

SEQ ID NO: 536 - protein, 249 aa, Blastopirellula marina DSM 3645, unfinished sequence"
MVRSRGFASLPDLASELEVSESTVRRDLDSLEDSGSAKRTHGGVFYTGPTPNLPHFELRQEMQWEKKRQIARAASVLIEDGDTVLLDGGSTTYELAQLLVGRTLQVVTNSLPVANLFMASNTTDLIFVGGYVHNRTGVSCGPYATEMIAKLNARRAVLSTAGITEQGLYNSNLLLIETEQAMVRAAGEVIIVADSTKFGRQSLAHQCPLAEIDRLVVDDQITPQWLTVLQDAGIDTIVADSTTPSEAVR

SEQ ID NO: 537 - protein, 714 aa, Blastopirellula marina DSM 3645, unfinished sequence"
ATGTCGCAAGCTCCGACTCTCGATCGCTCGACCATCGAACAAATCGTTCGCCAGATTGTCGCCGGCAAATCATCGCCGCCGGCCGCCTCGCCGGCTCCGGTCGACGCCGCGCAGGCCAAGTTGGTCGTCAGTATTTCAGCGCGTCACGTGCATCTGACCGACGCACATGTCGAAACGCTGTTTGGCCCAGGGCACACGCTGACCCCGATGAAGGACCTGTACCAAGACGGCTTTTACGCCGCCGAAGAGACCGTGATGGTCGTCGGCCCGCGTCGCCGGATGTTGGAAAAGGTGCGCATCTTAGGGCCGACGCGCGATTATAGCCAAGTCGAGTTGGCCTTTACCGACGCGATTTCGCTCGGCATCGATGTGCCGGTTCGCGCCAGCGGCAAGATCGCCGGAACGCCGGGCTGCGTGCTGGTGGGCCCGCGCGGCGTGGTCGATCTGTCGGAAGGAGTCATTCGGGCCGAACGACACGTGCACATGAATCAAAGCCACGCGCAGTTTTATGGAGTCGCCAACGGCGATCGGATGAACCTGCGAGTCGTATCAAACGGCTGCACGATCCTGTTTGAGGATCTGCTCGTGCGAGCCGACCAAGTGAGCAAGCTGGAAGTTCACCTCGATACGGATGAGGGGAACGCGTGCAACTTGGATGCGGCGACCGAGATTACGCTGTTGAAGCAAGAGCCGTGCGGCTGCAAAACGCACTAG

SEQ ID NO: 538 - protein, 237 aa, Blastopirellula marina DSM 3645, unfinished sequence"
MSQAPTLDRSTIEQIVRQIVAGKSSPPAASPAPVDAAQAKLVVSISARHVHLTDAHVETLFGPGHTLTPMKDLYQDGFYAAEETVMVVGPRRRMLEKVRILGPTRDYSQVELAFTDAISLGIDVPVRASGKIAGTPGCVLVGPRGVVDLSEGVIRAERHVHMNQSHAQFYGVANGDRMNLRVVSNGCTILFEDLLVRADQVSKLEVHLDTDEGNACNLDAATEITLLKQEPCGCKTH

SEQ ID NO: 539 - DNA, 309 bp, Blastopirellula marina DSM 3645, unfinished sequence"
atggcgaaggcaatggaagcgttgggcatgatcgagacgaagggctttattgctctcgtcgaggcgaccgacgcaatgatgaaagctgcgaacgtcaagttcgtcggctgggacaaagttggcagcggtttggtttcggttttcgtgaccggtgatgtcgctgcggtcaaagccgctaccgacgccggcgtcgcggcggctggacgtatcggcgaagtcgtcagcgttcaggtgattccgcgtccgcacgatgatctgacggtcgtgttgcccccgtcggttaactacggcggcggttccgccggttag

SEQ ID NO: 540 - protein, 102 aa, Blastopirellula marina DSM 3645, unfinished sequence"
MAKAMEALGMIETKGFIALVEATDAMMKAANVKFVGWDKVGSGLVSVFVTGDVAAVKAATDAGVAAAGRIGEVVSVQVIPRPHDDLTVVLPPSVNYGGGSAG

SEQ ID NO: 541 - DNA, 270 bp, Blastopirellula marina DSM 3645, unfinished sequence"
atgaacagtgcaattggtctgattgaaaccaagggattggttggcttggtcgaagcgaccgacgccatggcgaaagccgccaacgtcaaaattacgaagcgcgtcaacatcggcggcgcctttattacggctgttgtgaccggcgatgtcggcagcgttcgcgctgcggtcgaagcaggcgccgcggcggctcagcaagtcggcgaattggtcggcagccacgtgattccgcgtccggctgacggtctggtcgaagcctacttcagctag

SEQ ID NO: 542 - protein, 89 aa, Blastopirellula marina DSM 3645, unfinished sequence"
MNSAIGLIETKGLVGLVEATDAMAKAANVKITKRVNIGGAFITAVVTGDVGSVRAAVEAGAAAAQQVGELVGSHVIPRPADGLVEAYFS

SEQ ID NO: 543 - DNA, 1188 bp, Blastopirellula marina DSM 3645, unfinished sequence"
atgaagatattggtagccaacctcggttcgaccagcttcaagtaccgcttgcttgacatgcagagcgaaacgcagctcgcccgcggcggcattgaccgcatcggcggcagcgaaagctcttgctcagtcgagatcggcgcttggagcgaaaatcgaacggcgcatgttcctgatcacgcagtcgccgtgcagcaatgcttggcgcaactgaccgatcccgagcatggctgtctgcaatcggcggacgaagttgccgcgattggattcaaagcggtccatggaggacgcgtttcgggcgtacagaaggttacgccggaagtgctggaagcgatgacggaaatgagtcccgtcgccccagctcacaatccgccctacatcaaagcaatgcgattgttgggggagaagcttcccgagatcccgttggttgcggcgtttgaaaccggttttcatttgaccattcccgatcgaaatcgctactacgcgattccgaaagcctggtccgacgagtacctgatccagcgctggggatttcatggagcgagccaccgatttatcggagttcgttccgccgagctattgggacgcagcgacctgcgagtgatctcatgtcatctgggcggcagcagcagtttgtgcgcgattcgcgccgggcaaagcatggccgcgacgatggggatgagcccgcagacaggtttgccgcaaaacaatcgggtcggcgactttgacgcctatatcctccccatgttgatggagaagacaggcaagtcgttggaagaggtcctcgcctatctcggcagccatggcgggttgttagggatcagcggcggcatcagcggcgacatgcgtgacttggaggaagcggccgccggcggcaacgccgatgcgcaactggcgcttgacgtttacatcagcgaaatccgtcgttacttgggcggcatgctggtcgagttgggaggcgcggacgcgatcgttttcaccggaggaatcggggagaacggcaaggaagttcgcgcagccgtctgtgcgaacttgaacgaactaggaattgaactggacgcgacgaaaaacggcgccgtccaaggcgagtcggcgattcatgccgacggcagccgcacgcagatttgggtcattccgaccaacgaagagttgatcgtagcccggcaaaccaagcaactgttggagagctga

SEQ ID NO: 544 - protein, 395 aa, Blastopirellula marina DSM 3645, unfinished sequence"
MKILVANLGSTSFKYRLLDMQSETQLARGGIDRIGGSESSCSVEIGAWSENRTAHVPDHAVAVQQCLAQLTDPEHGCLQSADEVAAIGFKAVHGGRVSGVQKVTPEVLEAMTEMSPVAPAHNPPYIKAMRLLGEKLPEIPLVAAFETGFHLTIPDRNRYYAIPKAWSDEYLIQRWGFHGASHRFIGVRSAELLGRSDLRVISCHLGGSSSLCAIRAGQSMAATMGMSPQTGLPQNNRVGDFDAYILPMLMEKTGKSLEEVLAYLGSHGGLLGISGGISGDMRDLEEAAAGGNADAQLALDVYISEIRRYLGGMLVELGGADAIVFTGGIGENGKEVRAAVCANLNELGIELDATKNGAVQGESAIHADGSRTQIWVIPTNEELIVARQTKQLLES

SEQ ID NO: 545 - DNA, 135 bp, Blastopirellula marina DSM 3645, unfinished sequence"
gtggcgatgaccgaaccggtcactttcgcgatgaacatggatcagctctccaacagttgcttggtttgccgggctacgatcaactcttcgttggtcggaatgacccaaatctgcgtgcggctgccgtcggcatga

SEQ ID NO: 546 - protein, 44 aa, Blastopirellula marina DSM 3645, unfinished sequence"
MAMTEPVTFAMNMDQLSNSCLVCRATINSSLVGMTQICVRLPSA

SEQ ID NO: 547 - protein, 441 aa, Blastopirellula marina DSM 3645, unfinished sequence"
ATGTTCATCGCGAAAGTGACCGGTTCGGTCATCGCCACGCAAAAAGTGGAGTCGATGGTCGGCAACAAGTTGCTGGTCGTCGAACCGTACCGCTTGGAGCCGCAGGATCGCAGTTCGCTGGTCACGACGGGACGAACCTTCATCGCCGTCGACATGCTGGGCGCCGGAGTCGGCGACTACGTGTTGATCACGCAAGGCTCCAGCGCTCGCTTGACGCCGGAGACGAAGCACCTGCCGATCGACTGCGTCGTGGTCGGAATTGTCGACCAAGCGCATATCGATCACGCCTGCGTCTATTCGCGAGAAGAAACGCCGGCGCCGGAAGCCAAACCGGAACCTGCCGCGAAGAAGTCAAAACCGAAAGCGGCGCCTGCTCCGAAACCGACTCCGCTGCCGGAACCGGAACCGACGACTGAGCCCGAAGCGGACTCGGACGAGTAG

SEQ ID NO: 548 - protein, 146 aa, Blastopirellula marina DSM 3645, unfinished sequence"
MFIAKVTGSVIATQKVESMVGNKLLVVEPYRLEPQDRSSLVTTGRTFIAVDMLGAGVGDYVLITQGSSARLTPETKHLPIDCVVVGIVDQAHIDHACVYSREETPAPEAKPEPAAKKSKPKAAPAPKPTPLPEPEPTTEPEADSDE

SEQ ID NO: 549 - DNA, 1440 bp, Blastopirellula marina DSM 3645, unfinished sequence"
atgcaaatcgacgaatccttgatccgcagcgtcgtcgctcaggtgctagccgaagtcggccaggcgccggccgctacgagcggcttcaccggtcgccgcggcatttttgattgtgcccacgaagcggttcacgccgctcgcgaagcgttcgagcgactctcggagcgtacgatcgccgatcgcaagcaggtcatcgacattatccgccagatcgcgatggaccaaaaggtcgagctgggcacgatggagatgaacgaaacgcagatcggtcgtctgtcgcacaagatcgagaagctcgaaaccttgggtaagatgacccccggcgtcgagtttttggaaagcaaagtttatagcggcgaccatggtctggccatcatcgagcatgcaccgtttggcgtcatcggctgtattacgccggtcacccactcgctgccgaccatcaccggcaatgcgatcaacatgatcgccggcggcaacacgctggtggtcaatccgcatcccggcggcaagctggtcgcggccgaaggcgtgcggcgctacaacgaagcgatcttccgcgctctggggatcgacaacctgatctgcgtgatcgccgagccgacgctcgaaaccgccgacatcatcttccatcaccgcgacgtggccatgatctgcgtcaccgggggaccggccgtcgctagagcggccctcaactcgggcaagaaggcggtcgtcgccggacccggcaatccgccggtcgtcgtcgatgaaacggccgacctcgaccgagccgctcgctgcattattcagggcggatcgtacgacaacaacttgctgtgcatcgccgagaaggaagtcttcgtcgtcaactcggtctttgatgacctgatgaaagcgatggagcgagccggcgccgtccggttgaactcggccgagatcgatcgtctgactcgcgtcgcgatcagcgaagtcgaagtgaacggcaaaaagaagctggtcgccgccaaagacttcatcggcaaagacgcggccgtattggccaaggccgccggtaagaccatcaactcgcaggtcgaattgatctttggcgaaacggacgagcacaacccgtttgtcccggtcgaacagatgatgccgttcattcctttcgttcgctgtcacgatgtgaacgaagcgatcgaaaaggcgaaattctatgaacacggcttccgtcatacggcgatcattcactcgaacaatgtccgcaacatgacccgcatgggtcgcgcgatggacacgacgctatttgtcaaaaacggtccctgcatggcgtcgctcggcttagggggcgagggttacatctcgttctcgatcgcgacgccgaccggcgaaggcgtgacgaccccgttgacgtttacgcgtgagcgacgctgctcgctgattgacgatctgtgcatcctcggtcacccgagcaagagctaa

SEQ ID NO: 550 - protein, 479 aa, Blastopirellula marina DSM 3645, unfinished sequence"
MQIDESLIRSVVAQVLAEVGQAPAATSGFTGRRGIFDCAHEAVHAAREAFERLSERTIADRKQVIDIIRQIAMDQKVELGTMEMNETQIGRLSHKIEKLETLGKMTPGVEFLESKVYSGDHGLAIIEHAPFGVIGCITPVTHSLPTITGNAINMIAGGNTLVVNPHPGGKLVAAEGVRRYNEAIFRALGIDNLICVIAEPTLETADIIFHHRDVAMICVTGGPAVARAALNSGKKAVVAGPGNPPVVVDETADLDRAARCIIQGGSYDNNLLCIAEKEVFVVNSVFDDLMKAMERAGAVRLNSAEIDRLTRVAISEVEVNGKKKLVAAKDFIGKDAAVLAKAAGKTINSQVELIFGETDEHNPFVPVEQMMPFIPFVRCHDVNEAIEKAKFYEHGFRHTAIIHSNNVRNMTRMGRAMDTTLFVKNGPCMASLGLGGEGYISFSIATPTGEGVTTPLTFTRERRCSLIDDLCILGHPSKS

SEQ ID NO: 551 - DNA, 261 bp, Blastopirellula marina DSM 3645, unfinished sequence"
atgaatttggccaaggtagtcggcacggcgaccagcaccgtcaagcatccttcgatgcaaggctggaagctgctagtcgtgcaaccgcaacaagctgacggcgtgacccctgatgggcacccgctgttggcgattgatgcggtcggcgccgggccaggcgaaaccgtgatgatcaccagcgacggtgagacgacccgcgaactattgggttttcccaagacgccggttcggtggacggtcatcggaatcgccgacgaataa

SEQ ID NO: 552 - protein, 86 aa, Blastopirellula marina DSM 3645, unfinished sequence"
MNLAKVVGTATSTVKHPSMQGWKLLVVQPQQADGVTPDGHPLLAIDAVGAGPGETVMITSDGETTRELLGFPKTPVRWTVIGIADE

SEQ ID NO: 553 - DNA, 669 bp, Blastopirellula marina DSM 3645, unfinished sequence"
atgcaactgaactcggaacaaatcgaacgcatcgtgcggctggtcgtccagcaagtgcgggcgctcgccaaaagttctgagccgacagtgacgctggctccgagcgtcgagatttcgaccgacggcagcgaagtcgctttggcggatcgcgtggtcacgatggagacgctggaaggaaagatcggcggcgctaaggcgctggtcgtttctccgtcggcgatcgtgactccggcggttcgcgacgcgttgcgtgatcgcggcgtccagttgcggcgtgatagcgaagcggccaaacgagccaaaaagccggtcgaagtgttagccttcgccgccagcggcgtcacgtcgtggcgcgaacgcggaccggtgggcgtgttcatcgatttgacgtcgacggtcaagcaagcggcgctagccgtccaacaagacaagatcgtggttttgctcaccgagtcgccggaggcggcttgctgtgcggccaatcgcgacgcgcaggttcgtgcggtgtcgatcgactcgatcgcgacgctcgaacgtgttttaccgcaaacggcggcgaatgtgatcgcggtcgatcccagcaagatcgctcgtgacgaaatcgccaagctgatggaaacgattcacctgcatcagactgtcgcaccgccggcagcgctgctgcggtag

SEQ ID NO: 554 - protein, 222 aa, Blastopirellula marina DSM 3645, unfinished sequence"
MQLNSEQIERIVRLVVQQVRALAKSSEPTVTLAPSVEISTDGSEVALADRVVTMETLEGKIGGAKALVVSPSAIVTPAVRDALRDRGVQLRRDSEAAKRAKKPVEVLAFAASGVTSWRERGPVGVFIDLTSTVKQAALAVQQDKIVVLLTESPEAACCAANRDAQVRAVSIDSIATLERVLPQTAANVIAVDPSKIARDEIAKLMETIHLHQTVAPPAALLR

SEQ ID NO: 555 - DNA, 291 bp, Blastopirellula marina DSM 3645, unfinished sequence"
atgcgaatcgcagaaatcgtcggcaaggtgacgcttagtcgcgttcaccccagcttgcagggcgcccagctcaaactggccgtgccgctgatgctggaggatttgcgcggcgagaccgatctgctggaagcggagtttttggtggtgtacgactccttttcggcaggcgtgggagaacgaatcgcgctcagcgaagggggagaagcggcccaaccgttttatcccgaattgaaaccggtcgacgcgtacaacgcggcgattctcgataccgtccatttacgtgaccaataa

SEQ ID NO: 556 - protein, 96 aa, Blastopirellula marina DSM 3645, unfinished sequence"
MRIAEIVGKVTLSRVHPSLQGAQLKLAVPLMLEDLRGETDLLEAEFLVVYDSFSAGVGERIALSEGGEAAQPFYPELKPVDAYNAAILDTVHLRDQ

SEQ ID NO: 557 - DNA, 864 bp, Blastopirellula marina DSM 3645, unfinished sequence"
atgatgaacgttcaccgaatcaagcaagacatgtgcgaaatcggccgtcgaatctacaacaaaggattcgccgcggccaatgacggcaacatcaccgttcgcgttagcgagaacgaagttctctgcacgccgacgatgcagtccaaaggcttcctgaagccggaagacatcgcaacgatcgacatgaccggcaagcagatcgccggcagcaagccgcgctcgagcgaagcgctgctgcatttggagatctaccagcgtcgcgccgacatcaagagcgtcgttcattgccatccgccgcacgcgaccgcgttcgccatcgctcgcgagccgattccgcaatgcgtgctgccggaagtcgaagtcttcttgggcgacgtgccgatcaccaaatacgaaacgcccggcggcaaggccttcgccgaaacgatcctgccgttcgtcgacaagaccaacatcatcttgctggcgaatcacggcacggtcagctacggcgaaacggtcgaacgcgcctactggtggaccgaaattctggacgcctattgccgcatgctgatcttggcgaagcaattgggccgcgttgagttcttctcggaagagaaagaacgcgaactgctcgacctgaagcagcgttggggttggagcgatccgcgcaacaccgaagagtacaaagattgcgacatctgcgccaacgacatcttccgcgacagctggaaagattcgctgatcgaacgcaaagcgtttcccgctcctccggcgatgggccccaacgccaacaaagcggccgctccggtgaccggcgatcaggaagcgttgattcaagcgatcaccagccgcgtgatggccgagttgtcgaaacgctcgtag

SEQ ID NO: 558 - protein, 287 aa, Blastopirellula marina DSM 3645, unfinished sequence"
MMNVHRIKQDMCEIGRRIYNKGFAAANDGNITVRVSENEVLCTPTMQSKGFLKPEDIATIDMTGKQIAGSKPRSSEALLHLEIYQRRADIKSVVHCHPPHATAFAIAREPIPQCVLPEVEVFLGDVPITKYETPGGKAFAETILPFVDKTNIILLANHGTVSYGETVERAYWWTEILDAYCRMLILAKQLGRVEFFSEEKERELLDLKQRWGWSDPRNTEEYKDCDICANDIFRDSWKDSLIERKAFPAPPAMGPNANKAAAPVTGDQEALIQAITSRVMAELSKRS

SEQ ID NO: 559 - DNA, 942 bp, Blastopirellula marina DSM 3645, unfinished sequence"
atgaaagttagcatcatcggcggcggcgggttggttggttcgtgtgcggcgtttgcgctgcagtgcggcggcatcgctcgcgaaatcgcgctgctagacctcaacgccgatctcgccggcggacacgctttggacttgctgcatggcgctccgagcgtcgccgatcaggtcatcacctccggcggatacgagcatatccccgatagcgacgtgatctgcatcacggccgggctccgtcgcaagccggacgaaagccgcttggatctgattaaccgcaacgtcgatctgtttctttcgattctcgatagcgtcaaaagcgccggcgtcaaaaaggatgcgatctgctttgtcgtgtcgaacccggtcgacattctgacttacctggccgcccaacgactcaatctgccgaccagccgcgtgattgggcttggtacgcagttggatacgattcgctttcgcgccttgatcgcgcaagagatgaaactgccgccgacgcaagtgaaggcgctgatcctgggtgagcacggcgacagcatgttgccggtctggtcggccgcgacggtcaacggcctgccgctcgacaagtttcctggctggacgcccaacaaagcgaccgaactgtttacccgcacccgcggcagcggcgccgaagtgatcaagaaaaaggggggcgccgggttcgccgtcggcatcgcgattcgggatgtgatcgaagcgatcgcactcgacaagaatcaagtcttacccgtttccagcgtgcaaaacggctgctacggcatccgtaacgtcgccctcagcgtgccgacgttggtgggtcgcgacggcgtcgccggcacgttcgaggtcgatctgtggccgaaggaaatgcagcagctgcgtcacagcggccaggtgctgcgtcagacgttggaaaccgttctcaagcgagtcggcggcaactag

SEQ ID NO: 560 - protein, 313 aa, Blastopirellula marina DSM 3645, unfinished sequence"
MKVSIIGGGGLVGSCAAFALQCGGIAREIALLDLNADLAGGHALDLLHGAPSVADQVITSGGYEHIPDSDVICITAGLRRKPDESRLDLINRNVDLFLSILDSVKSAGVKKDAICFVVSNPVDILTYLAAQRLNLPTSRVIGLGTQLDTIRFRALIAQEMKLPPTQVKALILGEHGDSMLPVWSAATVNGLPLDKFPGWTPNKATELFTRTRGSGAEVIKKKGGAGFAVGIAIRDVIEAIALDKNQVLPVSSVQNGCYGIRNVALSVPTLVGRDGVAGTFEVDLWPKEMQQLRHSGQVLRQTLETVLKRVGGN

SEQ ID NO: 561 - DNA, 1512 bp, Methylibium petroleiphilum PM1 plasmid RPME01
atgaagaccgccctgatggtctggggtgcgagcagcggcgccggcaagagtctgctcgcgacagcactgtgccgctgggccgcgcgcgagggcctgggcgtggcgccgttcaaggcccagaacatgagcaacaacgcccgcgtcgtgccgctggccgcgcacggatcggacgcggaagtgggcgagatcggctcggcccagtacttccaggcgctggccgcccgcgcggcgccgcaggtggacatgaaccccgtgctgctcaagcccgagcgcgacacggccagccaggtggtggtgcagggccgggtcgacgccgcgctgtcgcgcatgccctggcgcgaacgcagcgcccggctggcacgggccgcgcgcgagagcttcgatcgcatggccgcgcggcatgaggttctggtgatcgagggggccggctcaccggcggagatcaacctcgcgccgcaggactacgtcaacctcggcacggcgcgctgggcgcgcgagatcgccaccctgcaggcactgctggtggtggacatcgaccgaggcggcgctttcgcccacctgcacggcacctgggcgctgctgcccgacgacctgcgcaccagtcttgccgggttcgtgctcaacaagttccgcggcgatgcggcactgctggcacccgggcccgatcgcctgcaggcgctgaccggcgtgccagtgctgggcgtgctgccgatgaaccgcgaccatgggctgccggaggaggacgggctgtacggcgcggcgtcgggcccggccggtggcctgcgcgtggccatcgtcgcctggccgcagctgagcaacctcgacgaattccagccactggccgccgtggcatcggtgcgctgggtgcgcagcgcgggcgacctggacggcgccgattggatcgtgctgccgggctccaagcaggtcagcggtgacctcgcctggctgaaagcgcggggcctggacgccgccatcgtgcggcacgcccgcgccgggcggccggtgctgggcatctgcggcggcctgcaggcgctgggtgccttgctcgacgaccccgatggcgtggacggagaggcccatggcccgctgccgggcctgggcctgctgccgctggccacgcgctatgccgcgcccaagcggctgcgggccgcgccggtgcagttcgcgcctctggcccacccgtggcaggcgctgtcgtcccgacgctggcccgcctacgagatccgctgcggacgcacgcagtccatcgcaggcgccgcctccgcggccacgctggcgctgcacgatgccgagggcctgccgatcggctggtcggccgccgcggacccggggcaaccggaccggcacaacgtgctcggcatcgccacccacgggctgttcgaggacgctgcggtgctgcgcgccctcttcggccagcaggtgggcacgctggacgccactttcgacggcctggcggatttcatcgacacccatctcggcgcggccacgctgcgcgcactctttcactgctga

SEQ ID NO: 562 - protein, 503 aa, Methylibium petroleiphilum PM1 plasmid RPME01
MKTALMVWGASSGAGKSLLATALCRWAAREGLGVAPFKAQNMSNNARVVPLAAHGSDAEVGEIGSAQYFQALAARAAPQVDMNPVLLKPERDTASQVVVQGRVDAALSRMPWRERSARLARAARESFDRMAARHEVLVIEGAGSPAEINLAPQDYVNLGTARWAREIATLQALLVVDIDRGGAFAHLHGTWALLPDDLRTSLAGFVLNKFRGDAALLAPGPDRLQALTGVPVLGVLPMNRDHGLPEEDGLYGAASGPAGGLRVAIVAWPQLSNLDEFQPLAAVASVRWVRSAGDLDGADWIVLPGSKQVSGDLAWLKARGLDAAIVRHARAGRPVLGICGGLQALGALLDDPDGVDGEAHGPLPGLGLLPLATRYAAPKRLRAAPVQFAPLAHPWQALSSRRWPAYEIRCGRTQSIAGAASAATLALHDAEGLPIGWSAAADPGQPDRHNVLGIATHGLFEDAAVLRALFGQQVGTLDATFDGLADFIDTHLGAATLRALFHC

SEQ ID NO: 563 - DNA, 1035 bp, Methylibium petroleiphilum PM1 plasmid RPME01
gtggtgagccccggtacggccgcccgcgtccacggcggtgccgacgcacacggtgccgcgcgctgggacttctccacctgcgccaacgcggcgggaccgtgcccggccgcgctcgcagccgtgcaggcagccgacgcgacgcgctaccccgacccggccgccacggcagtccggcaggcgctgggggcactgcacgacgtcgagccttcgcggatcctgcccgccgccagtgcgagcgaattcatccagcgtgtcaccgcggtcaccgctcggctttggcccggtgccgtgcgggttccccgcttcgcgtatggcgactacgcggcggccgccgcggcgtggggccgcccctttgtcccccaggatgtcgaggtcccgggcacgccgtcgcagtgcacgctgcgctggcacgccgatccgacgagtccgctgggccaggacggcgctgtcgcccgtgacgactcctattgctgccccgccgtgctcgacgcggtgtacgcgccgctacggcttcagggagcgtcggcgtggacggcatccgcgcgcgatgcggtcttcgtgttgcacagccccaacaaggcgctgggcctgaccggcgtgcgcggcgcctacgcggtcgcgccacgagatcgcggtggcgccggctacgacgtgctggcctgccgagccgcgctggaggctgcggcgccgtcgtggccgctgtcggcccacgccgaggccatgctgctggcctgggccacgcccgacgtgcacgcctgggtggccgaatcacgcaccaccctggtggcatggaagtcggacctgctgcggcgcctgtcggcacgcggcttcgaggtgcggccgagcgtgacgccgtacgtcatcgtgcgcccaccgcgccccgtggcaccatcgctgctgcgcaggcaccacgtcgcggtacgcgacgcgacctcgttcggcctgccgggctggtggcgcctctcggcgcaagcgccctcggcacaggacgcgttgatgcacgcactggacctgctcgacgggggcctgccatga

SEQ ID NO: 564 - protein, 344 aa, Methylibium petroleiphilum PM1 plasmid RPME01
MVSPGTAARVHGGADAHGAARWDFSTCANAAGPCPAALAAVQAADATRYPDPAATAVRQALGALHDVEPSRILPAASASEFIQRVTAVTARLWPGAVRVPRFAYGDYAAAAAAWGRPFVPQDVEVPGTPSQCTLRWHADPTSPLGQDGAVARDDSYCCPAVLDAVYAPLRLQGASAWTASARDAVFVLHSPNKALGLTGVRGAYAVAPRDRGGAGYDVLACRAALEAAAPSWPLSAHAEAMLLAWATPDVHAWVAESRTTLVAWKSDLLRRLSARGFEVRPSVTPYVIVRPPRPVAPSLLRRHHVAVRDATSFGLPGWWRLSAQAPSAQDALMHALDLLDGGLP

SEQ ID NO: 565 - DNA, 903 bp, Methylibium petroleiphilum PM1 plasmid RPME01
atggtcgccgccgccgcgctcgccctggcttggttgatcgacagtcgcttcggcgagcctcgctcggcctggcacccggtggcctggttcggccgcatcgccgcgcctctgggtcgtcgtgtgcactcctgggctgcacctgccgccttcgcggccggtgcggtgttgtggtgcagcctcgtcgccgctgtcgcaggagcggccttcgccgtggagcaggccgccggggcagcgccggcatggatcgcgatcccgctgctcgccgcggcactgaagccgacattcgcgtggcggatgctgaacgacgaggtgcgcgccgtcgaagcggcgctcgggcaggggctcgaacaaggccaagcccgcgtcgcccggctgtgcagccgcgacgtcacccagctcgacgcggctgcggtgcgcgagacggccatcgaaacgttggccgagaacttcaacgattcgctggtcgcgccgctgttctggttcctggtcgccggcctgcccggtgcctgggcctggcgcgccgccaatacgctcgatgcgatgtggggctatcgcggcccctgggaatgggccggcaaatgggcggcgcgggccgacgacgtgatgggctatgtgcccgcgcgcctggcggcgttgctgctgtggcggccgagcgtgggcgtggctcgtctcacgcgcgaggctccgctgacgccgtcgcccaacggcggctggccgatggcggcgatggcgtttcgcatcggggtccggctcggcaaaccgggcgcctatgccttgaacgcgcaggccccggcgccggatgccgcagcactgacgaatgccttgacggtcggcgagggggcggcacgcggggcgatcgcggctgcgctgctgctggtcgtgctcaaggtgaacttgtggtga

SEQ ID NO: 566 - protein, 300 aa, Methylibium petroleiphilum PM1 plasmid RPME01
MVAAAALALAWLIDSRFGEPRSAWHPVAWFGRIAAPLGRRVHSWAAPAAFAAGAVLWCSLVAAVAGAAFAVEQAAGAAPAWIAIPLLAAALKPTFAWRMLNDEVRAVEAALGQGLEQGQARVARLCSRDVTQLDAAAVRETAIETLAENFNDSLVAPLFWFLVAGLPGAWAWRAANTLDAMWGYRGPWEWAGKWAARADDVMGYVPARLAALLLWRPSVGVARLTREAPLTPSPNGGWPMAAMAFRIGVRLGKPGAYALNAQAPAPDAAALTNALTVGEGAARGAIAAALLLVVLKVNLW

SEQ ID NO: 567 - DNA, 567 bp, Methylibium petroleiphilum PM1 plasmid RPME01
atggacatcgtcaagccacccaccgcacccagtccgaaggccgaaggcgaacgccgcggcctgatcctcgtgcacaccggccacggcaagggcaagagcacggccgccttcggcctggcgctgcgggcgcacggccgcggtatgccggtgaaaatctaccagttcatgaaagtgccctcggcccgcttcggcgagcaccgcatgttcgagcagctaggcatcccgatcgagggtctgggcgacggcttcagctggaagagccgtgacctcgagcacagcgcccagctcgcccgcgacggctgggcacgcgccgaggagaccatccgggccggcgagcactttcttgtcgtgctcgacgagatcacctacccgctgcgatacggctggcagccgctggagcccgtgctggcctgcctgcgcgagcggccggcccatgtgcatgtggtgctcaccggccgcgatgcgccgcaggagctgatcgatctggccgacaccgtcaccgaaatgacgctggtcaggcaccaccaccagcagggcgtgccggcgcagcggggcatcgaggactga

SEQ ID NO: 568 - protein, 188 aa, Methylibium petroleiphilum PM1 plasmid RPME01
MDIVKPPTAPSPKAEGERRGLILVHTGHGKGKSTAAFGLALRAHGRGMPVKIYQFMKVPSARFGEHRMFEQLGIPIEGLGDGFSWKSRDLEHSAQLARDGWARAEETIRAGEHFLVVLDEITYPLRYGWQPLEPVLACLRERPAHVHVVLTGRDAPQELIDLADTVTEMTLVRHHHQQGVPAQRGIED

SEQ ID NO: 569 - DNA, 804 bp, Methylibium petroleiphilum PM1 plasmid RPME01
atgaacccgacgctgcaggcgctgggcgtgggcgtccggctgggccgccgcgacgtgctgcatgccgtgagtcttgggatcggcggcggctggaccgcactcgtcggcccgaacggtgccggcaagtcgacgctgttgcgggccctcgcaggactacagcccttggcggcggggcaggtcttcctgaacccgggcgcggcggcccagccgctggatctgcaccggaccgcgcccgccgaccgcgcccgcgtgctggcctggctcgcgcagcagggcgaggtcaccggcgagctgactgtgcgcgagacagtcgagctcggccgcatcgcccgtctcggtctgctgggcacgccggtcgcggccgaccgcaaggctgtcgaccgcgcgatgaccttgaccgagagcttgccgtggcagcaccggcggctgcacgaactctccggcggagaacgccagcgggtgctgctggcgagggtaatggccaccgaggcgccgatgctgctgctcgacgagccgaccacccacctcgatgcgccacaccaggtggctctggcccgcctgttcaggcgtctgacacacgaccgctcggcgccgcgcgcggtactgagcgtgctgcacgacctgcccatcgcactgcaggccgatcgcctgctggtgctggatgcgggcacgctgcaggccgacggcccgcccactgatccggccgtgcaggccgcgctggtgcgcgtcttcggcggcgccatccgcatcgagtccgacgcccagggccgcccgcgtgtcgctctggccttggacgccacctga

SEQ ID NO: 570 - protein, 267 aa, Methylibium petroleiphilum PM1 plasmid RPME01
MNPTLQALGVGVRLGRRDVLHAVSLGIGGGWTALVGPNGAGKSTLLRALAGLQPLAAGQVFLNPGAAAQPLDLHRTAPADRARVLAWLAQQGEVTGELTVRETVELGRIARLGLLGTPVAADRKAVDRAMTLTESLPWQHRRLHELSGGERQRVLLARVMATEAPMLLLDEPTTHLDAPHQVALARLFRRLTHDRSAPRAVLSVLHDLPIALQADRLLVLDAGTLQADGPPTDPAVQAALVRVFGGAIRIESDAQGRPRVALALDAT

SEQ ID NO: 571 - DNA, 1062 bp, Methylibium petroleiphilum PM1 plasmid RPME01
atgagcatgtcctttgtctcgacgaaccagccggcgttcgacgcagcgatgggcgacgcagaggcacgccgccggctcgcggccgggatcgcactggccatcgtcgtgggcctcgcctgcggcctggccaccggctcgacgggcttcgcgcccagggacttctgggcggacctcaacggcaacgacgccgcgctcctgctcggacagatccgcgcaccccggacgctgggtgccgcgctggtgggtgcgctgctaggcctgtccggcgcgatcgcgcaaggcgtcttccgcaacccgctggccgacccctaccttcttggcagcgcggcgggcgcggggctgggggtggtgctggtgcttgccgccgccgcactgggcggcgccaccatcagcctagccaccgtggcctggatcgagcgcgtagggattgtcaccgccgcgttcgtcggtgcgctggcgggggtgtcgctcacgctgacgctggccagtggcgccgtccacaccctgcggctgctgctggccggcgtggtgatcggcgtgctgctgggagccgtcagcgacctcatcacggtcgtctcgccggacgcgctgcgcggcaagcaggccttcatgctcggcagcaccggctttctcggctggaacgcgctggcgctgatgctcgccggcctgacgctgctgctggtgctggcacagcggcatgcccgagcgttggatgcgctgacgcttggcgaggacagcgccaccagtctcggcctgaacctcgggaaagtgcgactggccctggtgctgatgctcagcctgggcacggcgctggcggtttcgcaggccgggctggtcgccttcgtcgggctggtcgccccacatcttgtgcggcgccgcgcaccgggcacgcacgcctggctgctggtggccagcgccggcatgggcgccgcaatcctgctgtgggccgacgtcatttcgcgcgctctgatcgccccggaagaactgcccgtcggggtggtcaccgccgtgctcggcggcagctatctggtctggctgctcaagcagaggaccgcctcatga

SEQ ID NO: 572 - protein, 353 aa, Methylibium petroleiphilum PM1 plasmid RPME01
MSMSFVSTNQPAFDAAMGDAEARRRLAAGIALAIVVGLACGLATGSTGFAPRDFWADLNGNDAALLLGQIRAPRTLGAALVGALLGLSGAIAQGVFRNPLADPYLLGSAAGAGLGVVLVLAAAALGGATISLATVAWIERVGIVTAAFVGALAGVSLTLTLASGAVHTLRLLLAGVVIGVLLGAVSDLITVVSPDALRGKQAFMLGSTGFLGWNALALMLAGLTLLLVLAQRHARALDALTLGEDSATSLGLNLGKVRLALVLMLSLGTALAVSQAGLVAFVGLVAPHLVRRRAPGTHAWLLVASAGMGAAILLWADVISRALIAPEELPVGVVTAVLGGSYLVWLLKQRTAS

SEQ ID NO: 573 - DNA, 945 bp, Methylibium petroleiphilum PM1 plasmid RPME01
ttgatccgtactgaaccgcccatttggtcctccacacagtccatcgagaagacgccgcagcctcgcgccgtgttgcgtttgctgctgtggctgcacttggcgttggttccctcatggacagcggcccagcccattcagattcgagacgaccgcggcaccgagcaccgcctcgccgcgccgccacagcgcatcgtgaccatgctgccgtcgctcaccgagaccgcctgggtgctgggcgtcgattcgcggctggtgggcgtggaccggtactcgaactggccggccgaggtcgcgaagctgccgcacctgggcgggctggacgatgcgcagatcgaggccatcgcggcgctcaagcccgatctcatcctggcctccacctcgtcgcgcgcaatggagcggctcgaagcgctcggcttctccgtcgtgcgcctgaagtcggagagccacgccgacgtgcgccgcacgctcgacctcgtcgcccgcctgctcggcaaccccgacgaaggggcccgggtgtgggcgcgcctggcgcgcgagatcgatgccgcggcggggcgggtaccggcctcgctgcgcgggcggcgcgtctacttcgagatcggcggcggcccctatgcggccggcactacctcgttcatcggcgagaccctggcgcggttggggctggcgaacatcgcgccgccggacctcggtcccttcccgaagctgaaccccgagtacgttgtgcgcgccaagcccgacctcatcatgggcgtgcagcgcgagcagtcggccttgatggcacgccccggctggaatgccctggctgccgtgcgtgagcggcgcttgtgcggcttcgagacgcctcagtacgagatgctgatccggcccggaccgcgcatgggtgaagccgccggtctgctggcggactgcctggcgcggctcgggacgacggcgacccgatga

SEQ ID NO: 574 - protein, 314 aa, Methylibium petroleiphilum PM1 plasmid RPME01
MIRTEPPIWSSTQSIEKTPQPRAVLRLLLWLHLALVPSWTAAQPIQIRDDRGTEHRLAAPPQRIVTMLPSLTETAWVLGVDSRLVGVDRYSNWPAEVAKLPHLGGLDDAQIEAIAALKPDLILASTSSRAMERLEALGFSVVRLKSESHADVRRTLDLVARLLGNPDEGARVWARLAREIDAAAGRVPASLRGRRVYFEIGGGPYAAGTTSFIGETLARLGLANIAPPDLGPFPKLNPEYVVRAKPDLIMGVQREQSALMARPGWNALAAVRERRLCGFETPQYEMLIRPGPRMGEAAGLLADCLARLGTTATR

SEQ ID NO: 575 - DNA, 582 bp, Methylibium petroleiphilum PM1 plasmid RPME01
atgacgcaggcacgacatgaactgatcctgggcggcgccaagagcggcaagtcgcgcaccgcggaaagccgtgccgccagatggctgggcgaaggcggccaccggcgcgcggcgctggtggccacggcgctgcgcggcaaggtcaccggcgacgcggagatggaccggcgcatcgcgaggcatcgcgcggaccgtgcggcccgcgttcctcaactgcagaccgtcgaagcggcggatgccctcggcggcaccctgcagggtctgtcggacccgcaactcctcatcgtggtcgactgcctgacgctgtggctgacccagatcctgatgccgccgcccggacgggtcgcgtcagccgcgctctggcaccaggaacgggaggccttgctgtcggccctgcgcgagagcgcctctcccatcgtgctggtgtccaacgagatcggcctgggggtgctgccgatgtcgcgcgaggcgcgcgacttcatagacacgctgggtctgctgcaccaggccgtggccgggctctgcggccgcgtgaccttgatggtggccggctgtgaactgagcgtgaaggacgaaacttga

SEQ ID NO: 576 - protein, 193 aa, Methylibium petroleiphilum PM1 plasmid RPME01
MTQARHELILGGAKSGKSRTAESRAARWLGEGGHRRAALVATALRGKVTGDAEMDRRIARHRADRAARVPQLQTVEAADALGGTLQGLSDPQLLIVVDCLTLWLTQILMPPPGRVASAALWHQEREALLSALRESASPIVLVSNEIGLGVLPMSREARDFIDTLGLLHQAVAGLCGRVTLMVAGCELSVKDET

SEQ ID NO: 577 - DNA, 1359 bp, Methylibium petroleiphilum PM1 plasmid RPME01
atggccgccgccctgctgatcgccgccccggcctccggccagggcaagaccacggtggcggcggcactggcgcggctgcacgcacggcagggccggcgcgtgcgctgcttcaagtgcggtcccgacttcctcgatccgatgtggctggaagcggcgagcggccgcccggtcgacgccctggacctgtggatcaacggccccgacgactgcgcgcagcgcctggccgctgccgccagcaaggccgacctcatcatcgtcgaaggcgtcatgggcctcttcgatggcgagcccagcgccgcggacctggcgcagcgcttcggcatcccggtggcggcggtgatcgacgccggtgcgatggccggtaccttcgccgccgtggcgcatggcctgcgccactggcggcatgccctgccgtgggcgggggtcttcgccaaccgggtgggcagcccccggcacgccgacatgttgcgcgaagcgctggacccggcgcggcccgacgacggcggcccgtggctgggccaactgtcgcgcagcgacaccgtcgctctgcccgaacgccacctggggctgacgatgcccgccgaagcagcggacacgcgggcaaggctcgatgccgccgcagatgccgttgcgggccagcccctggggcgcgaactcgccgcctggcctcggtggcagccaccgcaggccccgcagccggcgccttgccggcggcccctggccggacggcgcatcgccgtggcgcgcgacgcagccttcgcattcatctacgcggccaacctcgaggtcctgcgcgaactcggtgcgcggccggtgttcttctccccgctggccggcgactccctgccgccctgcgacgcactgtggcttccgggcggctatcccgaactgcatgcggcgcggctggccgaatgcgcccggctgcgcgcgcagattgctgcacacgtgcagtcgggcaagccgctgtgggcagagtgcggcgggctcatggtgctggccgagcgcctggtcgacgccacgggccggtcgcacgccatgtggggcctgctgccgggcaccgccgtgctggggcggcgcctcgcggccttgggtccgcatgagatgccgctcgcggcagaggcgatgccactgcgcgggcacagcttccactggtcccgcttcgagacgacgctcgagcctgcctctttcaccacgccgcagcgccggtccgcagccgccggcgacggcgacggcgacggcgacggcgaggcggtctacgagcttggcagcctgcgcgcgagttggttccacccgtggttcgcctcgtcacctgccgcggccgcccgtttgttcgacatgccctcgccgttccggccatga

SEQ ID NO: 578 - protein, 452 aa, Methylibium petroleiphilum PM1 plasmid RPME01
MAAALLIAAPASGQGKTTVAAALARLHARQGRRVRCFKCGPDFLDPMWLEAASGRPVDALDLWINGPDDCAQRLAAAASKADLIIVEGVMGLFDGEPSAADLAQRFGIPVAAVIDAGAMAGTFAAVAHGLRHWRHALPWAGVFANRVGSPRHADMLREALDPARPDDGGPWLGQLSRSDTVALPERHLGLTMPAEAADTRARLDAAADAVAGQPLGRELAAWPRWQPPQAPQPAPCRRPLAGRRIAVARDAAFAFIYAANLEVLRELGARPVFFSPLAGDSLPPCDALWLPGGYPELHAARLAECARLRAQIAAHVQSGKPLWAECGGLMVLAERLVDATGRSHAMWGLLPGTAVLGRRLAALGPHEMPLAAEAMPLRGHSFHWSRFETTLEPASFTTPQRRSAAAGDGDGDGDGEAVYELGSLRASWFHPWFASSPAAAARLFDMPSPFRP

SEQ ID NO: 579 - DNA, 1845 bp, Methylibium petroleiphilum PM1 plasmid RPME01
atgacttcctcgtccttcggctgcgtgcagcgtgtcgctgccgctctcgttccctttgccctttcccccgttgccatggctcagtcggcgccgccgaccgcgctcgaacgggtggtcatcaccgccaaccgaacgccgcagccgctgtccacggtgctggccgatctcaccgtcatcgaccgcgacgagatcgagcgcgcaggcgttaccggcgtggctgatctgctggcgcggcagcccggtatcgagatcacgcgcaacggcggccccggcacctcgacgagcgtgttcatccgcggcagcgagacgcgccacacggccgtctacatcgacggcgtgcgcgtggactcccaatccaccggcggtgccgtgtgggagcaggtcccgctggaccagatcgaacgcatcgagatcctgcgcggaccagccgcagccatctatggctcggacgccgtcgcgggcgtggtccagctcttcacaaagcgcggccagggatctgcgcgtccgacggcgtcgctgaccgtcggctcatacaacaccgtccagagccaggttggcgtcagcggctcggccgatgcgctgaactactcgctgtcggcagcccacggccgcagcgacggattcgacgcgacgaagcccggcgccttcgggcacaaccctgacaaggacggctggaagcgcagttcggtgcagggtcgcgtgggctatcagatcaacgccgagcatcgcgtggatgcctccctgctcgccagtaacctgaagtcgggctacgacggctcggccacaaccaatgacgagaaccaccacacgctgcgcaccggcaacgtggcctggcagggccgctggaacgccgattcgacgacccgtctgcaggtcggtcagacccgcagcacctacgagacccagccgagcttctaccggaccgagacaacgctgaacgactacaccctgctgcacgagcagaaggtcggcggcaacgtgttcaccggcacgctggaacggcgcgaggacaagctcttcaaccccgcgaccgcgttcggctcggctttcggcggcaagcgtcaccaggacgccatcggcctgggctggcgcggcgacttcggcgaccacggcgtgcaggcccatgtgcggcgcgacgacgacaacgagttcggcggcaagaccaccggcagcctcgcctggggctggaagttcctggctgggtggcgcgtgacggccgcggccgccacgtccttccgcgtgccgaccctgtaccagcgcttcagcgagtacggcgtggccagcctcgtgcccgagtccggtcgcaatgtcgaactgggcttgcgttgggctgccgcgggcagcgaagcgagcctgacggcgtggcgcaacaaggtcaccaatctgatcgtgttcggttcgccgggcccatgcatcaacacttttggctgctaccagaacgtcggccgcgccgaactggaaggcgtgacgctcgccggccgcaccgcactgggcggcgtcgtgttgcgcggttcgctggactggcatgacccgcgcaacctcgacaccgacaaggtgctgaggcgtcgcgccaagcggctggcgaccttcggtgccaagacggtgctggcaggctggacggtgggcaccgaagtgcaggttgcgggactgcgatacgagagcgcggccaatacccaggtgctcggtggcttcggcctcgtgaatctctacgtcagcacgcagctgaacccggggctgtcgctcgaggcgcgcatcgacaacctcggcgacaagccctacgagctggcgcgcaactacgcgaccgccggccgcaacggccaggtctcgctgcgctggtcgctctga

SEQ ID NO: 580 - protein, 614 aa, Methylibium petroleiphilum PM1 plasmid RPME01
MTSSSFGCVQRVAAALVPFALSPVAMAQSAPPTALERVVITANRTPQPLSTVLADLTVIDRDEIERAGVTGVADLLARQPGIEITRNGGPGTSTSVFIRGSETRHTAVYIDGVRVDSQSTGGAVWEQVPLDQIERIEILRGPAAAIYGSDAVAGVVQLFTKRGQGSARPTASLTVGSYNTVQSQVGVSGSADALNYSLSAAHGRSDGFDATKPGAFGHNPDKDGWKRSSVQGRVGYQINAEHRVDASLLASNLKSGYDGSATTNDENHHTLRTGNVAWQGRWNADSTTRLQVGQTRSTYETQPSFYRTETTLNDYTLLHEQKVGGNVFTGTLERREDKLFNPATAFGSAFGGKRHQDAIGLGWRGDFGDHGVQAHVRRDDDNEFGGKTTGSLAWGWKFLAGWRVTAAAATSFRVPTLYQRFSEYGVASLVPESGRNVELGLRWAAAGSEASLTAWRNKVTNLIVFGSPGPCINTFGCYQNVGRAELEGVTLAGRTALGGVVLRGSLDWHDPRNLDTDKVLRRRAKRLATFGAKTVLAGWTVGTEVQVAGLRYESAANTQVLGGFGLVNLYVSTQLNPGLSLEARIDNLGDKPYELARNYATAGRNGQVSLRWSL

SEQ ID NO: 581 - DNA, 672 bp, Methylibium petroleiphilum PM1 plasmid RPME01
atgggactgcatgccgtgatcgacctgggcctcgccgacaaggtcgccgaggaaggacgttgcttgcggggcgagcatgtcatcccgttcgtgagcatggcatccgtcgacaggccggcgcccgatcagctgatgggccatctccatgcacgccgcttggcgtcggacacgctaccgaaggccgtcgaacggaacgccgagttctccgggctgccgacgcagttccactatcgagagcacttggctgcatgccctcggccgtctatgccgtcgaagaagctccgatccggcgcttgctcgcaacgttggagaaagaacgacttcggcggcgccccggggttgggccgcccgctgcgggatcggctccttgcgccgtcgctgcgctggaacggcaacgtctggatccgcgccgactgccgcgccttccgctgtacacctgtgcgcaccacgctgaatgccgcgatgcccgactccgtcgacgcgctcctcactcgctctgctgcccgccgaaccgacaggccggcactcattgtcgatgtgcatcggtggggctttgcggagctgaggctgcgctgtatcatcgtcgccgttggtgctcgtcgaggcgctccgccaagacagttcaacgggaatcagggaggtcgaggtcggacggaccgacacctaacctga

SEQ ID NO: 582 - protein, 223 aa, Methylibium petroleiphilum PM1 plasmid RPME01
MGLHAVIDLGLADKVAEEGRCLRGEHVIPFVSMASVDRPAPDQLMGHLHARRLASDTLPKAVERNAEFSGLPTQFHYREHLAACPRPSMPSKKLRSGACSQRWRKNDFGGAPGLGRPLRDRLLAPSLRWNGNVWIRADCRAFRCTPVRTTLNAAMPDSVDALLTRSAARRTDRPALIVDVHRWGFAELRLRCIIVAVGARRGAPPRQFNGNQGGRGRTDRHLT

SEQ ID NO: 583 - DNA, 303 bp, Methylibium petroleiphilum PM1 plasmid RPME01
atgagtgaactgagtcaactgagaggcagcgccctcggctttgtcgagacgcaggggaagacggcggcgacactggccgccgacgcgatggtcaaggcagcgaacgtccggctgctgacgatgcaacagcccgggggcggcatcatcacaatcatcgtgcgcggagacgtcggtgccgtgaaggccgctgtcgacgcgggcgaggcggcggccaaggtggtcggcaaggtgcgctcggcgcacgtcattccacggccgcacgacgacgtggaagacctcctcgagcgtccgcccgtccgctga

SEQ ID NO: 584 - protein, 100 aa, Methylibium petroleiphilum PM1 plasmid RPME01
MSELSQLRGSALGFVETQGKTAATLAADAMVKAANVRLLTMQQPGGGIITIIVRGDVGAVKAAVDAGEAAAKVVGKVRSAHVIPRPHDDVEDLLERPPVR

SEQ ID NO: 585 - DNA, 2535 bp, Methylibium petroleiphilum PM1 plasmid RPME01
atgaaggcgcagggctccgccgcgtcggcgccagccgtcgacgctccctgccttgtccacctgatccaggagatcgacggcatggacacggcgaagttcggtggcaaggccgcgggactggcacgcatggccgccgctggtattcccgttccgccggctttcgtcatcggcacggacgcctaccgcgccttccgcgattccggcgatctgccagagaacctgatgccccaggtcgatcgtgcgatgcgcgtgctcgagggtcacaccagccgctcgttcggcggtctgagcgcgttgccgctgctcgtatccgtgcggtcggggtcgcaggtcagcatgcctggcatgatggacacggtactgaacctgggcatcacctgtcgtggcgcgcagcgcctggcgcaggagaccggcaacgccgactttgccgtcgacacctgggtgcgcttctggcgcatgttcgccgagatcgtgctggacctggaggccgaggtgatcgagcacgcggttgtatcgctgttggaccagacgcgccgtgagccctccgaggagaacttcctccggctggagaccgccgttctcggcgcgatcgttgcgcaaggcgtcaacgaggtcagcgccgatccggcctggcaactgcgtcgggcaatcgccgccgtgttcgagtcctgggacagccggcgcgcgcgcgcctatcgcgcgcaccacaagatctccgacgaactggggaccgcagtaaccgtgcaagcgatggtcttcggcaacctggacagccgctcgggctccggagtcgccttcacccgcaacccgaacaccggtgcgcgcgagttgtacggcgagtttctcgccggccgccagggcgaggacctggtgtccggctctgccacgccgtcgccgctcggggcacccggcgggctgtccgaggcccatcaccgcgaattggccgaccacgggcatcgcctcgaggagatgtacggcgacgcggtggacatcgagttcaccgtcgaaggcgaccgcctctatttcctgcaggtccgccctgccaagcggacagcggcagcggccgtccggattgccaccgagctggtcgacgaaggcatgctgggccgtgccgcggcgttgaagcgggtcagcgtcgagcagctcaagaagctgctgcgacccgctttcgaacccgatgtgctggtacgaacccgtccgctgcttgaagggatcggggccagtcccggacacgcctacggcattgccgtgctggatgcggaccgtgcggcaacagtggcggcctcgggcgagcgagtaatcctggtgcgccccacaaccagtccgcaagacatccgcgggatgttggcctcgcgggccatcgtcacggccaagggcggcgcgctcagtcacgccgcagtggtctcccgtgcgctcgacgttccgtgtgtggtcggctgtgaggccatggaggtcgacctcgctgcgcgcagcttcaccgtcggcgatgagcgcctggaggaaggtgctccgctttccgtggacggtgcgacgggcaaggtgtacagcggcctgcttccgctggagccggcttcgcaggcgaccgaacagatcgaccgcttgctcgtctgggcagacgatcgcacccaagcgtcgttctgggcaggcagtgtcggcgccgcggatgcgcagaccgcactgcgacagtcacctcgcggcttcggcgtcgtggcgctgacggagctgatgatcgccgacgagacgctgggcgactttatcgatgcggtcaacgacctcgggcagcaacccgaccggaagtcgacgcaggatcggctcgcctgtcttgcctaccaggcttgccagcggctgatgctcgagtcggccggcacgccgatcgacctgcgtctgcccaacctgggttcgccccgggcgcagcgcatgatcggcagttgggcatcgcttgcaccgcggctgtttctgccgctgggtctcaagggcctgtacgtggcgctgcttcgcggcattgcggatgccgctcgcgagaccggtcatgcgcagaccacgccgctggtgcccggcatcacggccgcatccgaactgcaggccttcaagcgcgccgcagcgggcctcggactgaaccaggtcggcgtggtcctgcagagccccgccggcattgcggaggcgcacggcatcgccgaaggcgccagcgcggtctgggtcgacctgcgcgagatcatcaggacgtactacggctatccgagcgcgctgtccttcgccgacgacgtcttcgaaacttatgtcgctgacgggtacttggcgcacaacccgcggacggccttgggcagcaagctcgccgagttgttcgcgggcgtcgcggcggtggcggcgcaccggccggaggtgcgcatcggcgtcgaatgcggcgatggcgccgcgctcagcttggtcgaggatctgtaccgcagcggcgttcgcttgttttcgctgcccaccacggcgctgccctcggcacgtctggcgctcgggcaactggtggtcaaggagtcatcgacatga

SEQ ID NO: 586 - protein, 844 aa, Methylibium petroleiphilum PM1 plasmid RPME01
MKAQGSAASAPAVDAPCLVHLIQEIDGMDTAKFGGKAAGLARMAAAGIPVPPAFVIGTDAYRAFRDSGDLPENLMPQVDRAMRVLEGHTSRSFGGLSALPLLVSVRSGSQVSMPGMMDTVLNLGITCRGAQRLAQETGNADFAVDTWVRFWRMFAEIVLDLEAEVIEHAVVSLLDQTRREPSEENFLRLETAVLGAIVAQGVNEVSADPAWQLRRAIAAVFESWDSRRARAYRAHHKISDELGTAVTVQAMVFGNLDSRSGSGVAFTRNPNTGARELYGEFLAGRQGEDLVSGSATPSPLGAPGGLSEAHHRELADHGHRLEEMYGDAVDIEFTVEGDRLYFLQVRPAKRTAAAAVRIATELVDEGMLGRAAALKRVSVEQLKKLLRPAFEPDVLVRTRPLLEGIGASPGHAYGIAVLDADRAATVAASGERVILVRPTTSPQDIRGMLASRAIVTAKGGALSHAAVVSRALDVPCVVGCEAMEVDLAARSFTVGDERLEEGAPLSVDGATGKVYSGLLPLEPASQATEQIDRLLVWADDRTQASFWAGSVGAADAQTALRQSPRGFGVVALTELMIADETLGDFIDAVNDLGQQPDRKSTQDRLACLAYQACQRLMLESAGTPIDLRLPNLGSPRAQRMIGSWASLAPRLFLPLGLKGLYVALLRGIADAARETGHAQTTPLVPGITAASELQAFKRAAAGLGLNQVGVVLQSPAGIAEAHGIAEGASAVWVDLREIIRTYYGYPSALSFADDVFETYVADGYLAHNPRTALGSKLAELFAGVAAVAAHRPEVRIGVECGDGAALSLVEDLYRSGVRLFSLPTTALPSARLALGQLVVKESST

SEQ ID NO: 587 - DNA, 315 bp, Methylibium petroleiphilum PM1 plasmid RPME01
atggactatcagaaacagaaacgcgaccagcccgccgacgacgggctgcgcttgcagggcccgacctacgtcggccacttcaatgacttgccgcctgttctggacggaatcctcggcaacggcatgatgagagcgcgcacgaagggcaagacccgcatgaaggtcagcagggcgaatgtgctgtgcgaccagctcacgatccccgagctgaacgacctcaatgaccagcgtgcgtggaacacctacgacgtggccgtgatgcgcgccaacgagagtggccccggaatgagcccgcgccaggagagcacgacatga

SEQ ID NO: 588 - protein, 104 aa, Methylibium petroleiphilum PM1 plasmid RPME01
MDYQKQKRDQPADDGLRLQGPTYVGHFNDLPPVLDGILGNGMMRARTKGKTRMKVSRANVLCDQLTIPELNDLNDQRAWNTYDVAVMRANESGPGMSPRQESTT

SEQ ID NO: 589 - DNA, 975 bp, Methylibium petroleiphilum PM1 plasmid RPME01
gtgacccgcgcgatcctgttcgacctcgatggcacgctcgtcgacacgcgagccgcgtcatggcagttgttctctgagacgaatctcgcgttcgcactcggaatcgactcacgcgaggccttcttccgggccttcgaaggcaacttcttcgagtccctggccaagctctgccccgatccgcagcgcgccgcggcggtcaaggcacacttcatggagctgctgcgcacgcgctaccacccggcactgatcccgggcatggtcgacgtggtgcgcgcgctggcgcctcacagcacgctggccgtcatctcgacgaacggcatcgaggcgatccgtcgcattctggtcggtgccgatctggccaactgcttctcgcacgtcttctcaggtgacgtggagccgcgcaaggcggtttcgatccgccgttttctcggggaccaccgctatgcggtgcaccgcgcctgctcgccggcctatcacgatggcgaagccagccacgcgtcgctgcaggcgcaggatgtcgtgttggtcaccgacaccgtcggagacgtccgggaggcccgcgaagccggcatccgcgcgatcggcgtgacctggggcatgcacagcgaacgccaattgctcgatgccggcgccgaacgcgtggcgctgtggccgcaggaactggtcgcctggctgcgcgacgccgatgcgcctgcgacgagttgcggctgctcgagcgggtcggcagacagctgcgcattgccgccagcaccagcgcctgctgtccgcgctgcagccgcgccaccaacgggcgacccagtgagagaggtggcgcgccatcgccgcgaacgccagcttcacacccgcttgcaggccgctgccgcgacagctcctgcggcacccggcgccagcatggcctcggcagcgtccggcccgagcgcacgcaccgagctgatgtcctcgctgcaacgaatcctgagagaaggagaccactga

SEQ ID NO: 590 - protein, 324 aa, Methylibium petroleiphilum PM1 plasmid RPME01
MTRAILFDLDGTLVDTRAASWQLFSETNLAFALGIDSREAFFRAFEGNFFESLAKLCPDPQRAAAVKAHFMELLRTRYHPALIPGMVDVVRALAPHSTLAVISTNGIEAIRRILVGADLANCFSHVFSGDVEPRKAVSIRRFLGDHRYAVHRACSPAYHDGEASHASLQAQDVVLVTDTVGDVREAREAGIRAIGVTWGMHSERQLLDAGAERVALWPQELVAWLRDADAPATSCGCSSGSADSCALPPAPAPAVRAAAAPPTGDPVREVARHRRERQLHTRLQAAAATAPAAPGASMASAASGPSARTELMSSLQRILREGDH

SEQ ID NO: 591 - DNA, 999 bp, Methylibium petroleiphilum PM1 plasmid RPME01
gtgatcaaggatcaggacgcggaattccacgtcaccgactcggacccgacctgggctgagacgaacttcttcggcttcttcaacgccgagcacaagctgaacgtgggcgtgtatgcgctcttccggccgaaccttggcgtcgtcagctccacgatctgtatgaattcgggccgcgccgtcacgccctgggaagcggacttctgcgatctgcgctccgcgatgccgatcccgacgccgcgctcgctgctggactacaagctgctcaacacgctgcacgtgcactgcctggatccgaaccgcgtctggcacatcggctatgacgaccagcagggcacacgcatcgatgtgcgctacgaagcgctgatgccggcgttcgacatccatgacccagagatggacccgatgtgcggctccgagagcgaggcaggcaagttcgcctggggtaccgcgtacgacggccacttcgaccagaccggccacttcaagggcagcgtggcaatccgcggacgcgaggtgccgatcgactgcgtctcgacgatggaccacagctggggggcccgtcccgagcgtggcaagcccaacatgagctggttgcacgcgcacttttcgaaggacctggccgtgcacggcatcttcgggttcgaccagacgcgcaatggcgtcgagctctggctcgcccatggctacgtgatggagcgcggccgcatcgtcgggctgaaggccggcacgggacaggtcgagcgcccgcaggaacgctaccccgagcagctgcagctgcaggtgacggacgccaaggaccgcgtctggaagctgcgcggccgtgcgctgaccacgttcccgtggcagtgctggcccaacatgatctctttcaactccttgtgcgcgtgggagatgaacggcttgaagggtcacggcgaggtccaggacttctttgaactgccgcaactgaacgcgctgaacagcgtcgagtccacgcgccgcccgtcacgtcccctctga

SEQ ID NO: 592 - protein, 332 aa, Methylibium petroleiphilum PM1 plasmid RPME01
MIKDQDAEFHVTDSDPTWAETNFFGFFNAEHKLNVGVYALFRPNLGVVSSTICMNSGRAVTPWEADFCDLRSAMPIPTPRSLLDYKLLNTLHVHCLDPNRVWHIGYDDQQGTRIDVRYEALMPAFDIHDPEMDPMCGSESEAGKFAWGTAYDGHFDQTGHFKGSVAIRGREVPIDCVSTMDHSWGARPERGKPNMSWLHAHFSKDLAVHGIFGFDQTRNGVELWLAHGYVMERGRIVGLKAGTGQVERPQERYPEQLQLQVTDAKDRVWKLRGRALTTFPWQCWPNMISFNSLCAWEMNGLKGHGEVQDFFELPQLNALNSVESTRRPSRPL

SEQ ID NO: 593 - DNA, 312 bp, Methylibium petroleiphilum PM1 plasmid RPME01
atgcagctggctcgcgttcgcggcaacgttgtcgcatcgatcaaggccgccggtctggcatcgcacaagcttctgttggtcgagccggtgcgggcctcggcaccgcaggacgacgccgacggcgtcgaaccgtcgtccacctacgtcgcgatcgacctggccggtgccggcgttggagaaatcgtgctcgtgacgctgggcagcgccgcgcgcgtcgattcggacggacacaacgctcccaccgacgccgccgtcatcgcgattgtcgactcggttcagttcgacggcgaaaccactttccagaagcgctag

SEQ ID NO: 594 - protein, 103 aa, Methylibium petroleiphilum PM1 plasmid RPME01
MQLARVRGNVVASIKAAGLASHKLLLVEPVRASAPQDDADGVEPSSTYVAIDLAGAGVGEIVLVTLGSAARVDSDGHNAPTDAAVIAIVDSVQFDGETTFQKR

SEQ ID NO: 595 - DNA, 318 bp, Methylibium petroleiphilum PM1 plasmid RPME01
atggcaacgaaccccaccacgaccggcgcggtcaacgacggcccgcgcggcgcgctcgggctgatcgagaccaagggtctggtcggcgcgatcgaggccgccgacgcgatggtcaaggcggccaacgtgcggctggtcgggcgcgagcagatcggtggcggccttgttaccgtgatggtgcgcggcgacgtcggcgcggtgaaggccgcgaccgatgccggcgcggccgctgccgggaagatcggcgagattgtctcggtgcacgtgatcccgcgcccgcacgaagacgtcgaaggcatcctgcccaagccgcgctga

SEQ ID NO: 596 - protein, 105 aa, Methylibium petroleiphilum PM1 plasmid RPME01
MATNPTTTGAVNDGPRGALGLIETKGLVGAIEAADAMVKAANVRLVGREQIGGGLVTVMVRGDVGAVKAATDAGAAAAGKIGEIVSVHVIPRPHEDVEGILPKPR

SEQ ID NO: 597 - DNA, 1398 bp, Methylibium petroleiphilum PM1 plasmid RPME01
gtgaccgacttcaaccttctagatccagaactcgtggcgatcggcgaggcgcgcaccaaagcgcagctctcccgccaagccttcgagtccttccagggtgtcacccaggagcaggccgaccgaatcgtcgatgccatgggccaggctgcagaggcggcggcggcggaactggcgcgcttggcagtcgacgagaccggctacggggtgtacgagcacaagatcctcaagaacctctacaacgccaagttctgcgcgcatgcgatgaagaagatgcgcactttgggcgtgctgtggaccgacgaggtggcacgcgtgacggcgatcggtgcgcccatgggcgtgatcgccgcgatcatcccggtgaccaatcccacctcgacgacgatcttcaagtgcctggcggcggtcaaggcgggcaacgcgatcgtctgcgcgccgcatccgcgggcggcgaagtgctgcgtgcggaccgtggagatcatggccgaggcggccgagcgcgccggcgcgccgatcggcctgctgcagtgcctgtctggcggccagctgcccgccacgcgcgagctgatggcgcaccgcgacaccgcgctcgttatggcgaccggcggggctgcgatggtccgggctgcctactcctcgggcaagcctacgctggccgtcggcgccggcaacgtcccggtctacatccatcgttcggtggcggacgtgtcggaagcggcgctgatggtcatcacgtcgaagtcgttcgacaacggcaccgcctgcgttgcggagcagtcggtggtgctcgatgagccgatcgccgacgctgccatcaaggccttcgagcagcatggcaccgtgttcctcgacgccgagcagcagcgccggctgaccgagctgctgtttatcgggcgcggggcgctcaatccggaggctgtgggtcagaccgcgaccgagctggcccggcgcatcggcatgaccgtgccacccgggacgaaggtgctcggcgccgcgctggacgacgtgggtccgcagacaccgctgtcagccgagatcctcggacccgtgctgtcgttctatcggacacgcgatcttggcgccgcacatcagcgctgccgcgaggtgctggccttcggcggtgagggccacacgctcggtctgcacggccaggacgcggagatggtggcgcgcatgtcggacctgccagcctcgcgcatcgtcgtcaacacgccgagcctactcggcggcatgggcttcagcgccggcaccgatccgtcgttcatgctgggcacgggcacgtggagtggctcgatcgtgtcggacaacgtcacgccgatgcatctcattaacatcaagcgcgtcgcccaccagaaccgcccctggcgcgacatctacctgccgacgatggggctgtag

SEQ ID NO: 598 - protein, 465 aa, Methylibium petroleiphilum PM1 plasmid RPME01
MTDFNLLDPELVAIGEARTKAQLSRQAFESFQGVTQEQADRIVDAMGQAAEAAAAELARLAVDETGYGVYEHKILKNLYNAKFCAHAMKKMRTLGVLWTDEVARVTAIGAPMGVIAAIIPVTNPTSTTIFKCLAAVKAGNAIVCAPHPRAAKCCVRTVEIMAEAAERAGAPIGLLQCLSGGQLPATRELMAHRDTALVMATGGAAMVRAAYSSGKPTLAVGAGNVPVYIHRSVADVSEAALMVITSKSFDNGTACVAEQSVVLDEPIADAAIKAFEQHGTVFLDAEQQRRLTELLFIGRGALNPEAVGQTATELARRIGMTVPPGTKVLGAALDDVGPQTPLSAEILGPVLSFYRTRDLGAAHQRCREVLAFGGEGHTLGLHGQDAEMVARMSDLPASRIVVNTPSLLGGMGFSAGTDPSFMLGTGTWSGSIVSDNVTPMHLINIKRVAHQNRPWRDIYLPTMGL

SEQ ID NO: 599 - DNA, 825 bp, Methylibium petroleiphilum PM1 plasmid RPME01
atgctcatgcgaacccagaccgacactggcttggcgcgtgtgcagcgcttcctggacggcgccgctgcgcgtctgcgcgaaccgtcgacgccgcaggtgccgctgcgcttcggggtggacctcggcacggcgaccgtcgtgatcgctgccgtggacgcgcagggtgagcctgtgtactgggatttcatcagcgcccaggtcgtccgcgacggagtcgtggtcgactttcatggcgcagtgcaggcggtacggcagctgaaggccagcagtgaagcggcactcgggatggagatcgaagcagcggcaaccgcgcatccgccggcagtgccggtgagtgactgccgtgcctgtgccttcgtgctgcagcaggcggggatcgactgtcgcagcctcgtcgacgaggtcactgcggcgaacgccatcctgcaagtcaaagatggtgcggtcgtggacgtgggtggcggctcgaccggcgtcggcgtcttccgtggcggcgaactcgccaccctgagcgacttcgcaggtggcggccatcacctcgatctgatcctcgccggcgcactgaagcttcctgtcgaggtcgccgaggtgcacaagcgcgagcacggtgcagaagtcatgcaactgctgcgtccgggcatcgagcgcgtcgccgagtccgtccggcgccaatgcgccggacaggaccccggtaccgtctacctggcaggcggcgccctgcagatccccggcgccgatgccgttatcgcgcgatatctaggctggaaggtccagggctatgaacacgccgagctgatcactccctttggaattgcactgagctga

SEQ ID NO: 600 - protein, 274 aa, Methylibium petroleiphilum PM1 plasmid RPME01
MLMRTQTDTGLARVQRFLDGAAARLREPSTPQVPLRFGVDLGTATVVIAAVDAQGEPVYWDFISAQVVRDGVVVDFHGAVQAVRQLKASSEAALGMEIEAAATAHPPAVPVSDCRACAFVLQQAGIDCRSLVDEVTAANAILQVKDGAVVDVGGGSTGVGVFRGGELATLSDFAGGGHHLDLILAGALKLPVEVAEVHKREHGAEVMQLLRPGIERVAESVRRQCAGQDPGTVYLAGGALQIPGADAVIARYLGWKVQGYEHAELITPFGIALS

SEQ ID NO: 601 - DNA, 618 bp, Methylibium petroleiphilum PM1 plasmid RPME01
atggacaactttcaactgcgcacctacgccttcgtcgaccgcatgcagccgcaggcggcggcgcatgttgcctccacctgccaaggcgacgtgcccatcgccggcatgtccgagctttacatcgaggtcgcgccgggcaacgagatcttccgctgcgccgacattgctctcaaggcggccgatgtccggcctgcgcttcaggtcgtcgagcgcgagttcgggctactcgagatccactcgcgtactcaggcggaggtgcttgcggccggagccgccgtgctcgagcacctgaggctcaccgaggcggaccgggtcaaacccaaggtcgcctcgtcgatgttcgtgacgaacgtcaatccgtaccaggctcagctgatcaacaagtggcgcaagggcaacctgctcattcccggccaaagcctgtacgtgctcgaggtgtctccggccgcctatgtctcgctggccgccaacgaagccgagaaggcggccgacatcagcatcgtggaagtgcgcgcactgggccggttcgggcggttgttcatttccggcaccgagagcgacgtgcaggcggcggctaccgcggccatcgcttgcatcgagcagctggagggcaagtga

SEQ ID NO: 602 - protein, 205 aa, Methylibium petroleiphilum PM1 plasmid RPME01
MDNFQLRTYAFVDRMQPQAAAHVASTCQGDVPIAGMSELYIEVAPGNEIFRCADIALKAADVRPALQVVEREFGLLEIHSRTQAEVLAAGAAVLEHLRLTEADRVKPKVASSMFVTNVNPYQAQLINKWRKGNLLIPGQSLYVLEVSPAAYVSLAANEAEKAADISIVEVRALGRFGRLFISGTESDVQAAATAAIACIEQLEGK

SEQ ID NO: 603 - DNA, 1299 bp, Methylibium petroleiphilum PM1 plasmid RPME01
atggcccgcatgctgactgccgccgacgtcgaagccgcaggtggcaagctgatcctcgccgcaggggatcgcctgacgccgctggcccgagatcgggcccgggagctcggcatcgtcgtcgaggccgcaggtttgtcatctggcgtatcgacgccatctgcctcgcccacgtcgacttcggctccagtcgtgaagtcgccgcttgccgctccggcccctgcacccgtgcccgctgcacgcccggcgactccggtcgcgccgcccgccgccacgggttctcggccgctggcgctgccgccgtcgggtgctctttatcgccgcaacgcgttggggccgagtgcacaatcttcccgagcggtcgacgggcggcccaaggcgggcgtggtcggggccggccacgtgggcgcaatgacagccctgcgcctggccgaaagcgatctcttctcggaggtggcgcttgtcgacgtggtgccggggctggcggccgggctcgcactggacatgtggcatggcgccggcctgtacggcttctccacgcggctgtcgggcagcgatgacctcgtagcactggccggggccgagtacatcgtcatcactgccggcaagccgcgccagccgggcatgagccggaccgacctgacggtggtgaatgccgagatcatgacgtcggtgtgccgcggcatccgcacgcatgcgccgaactcgacgctcgtgatcgtgagcaatccgctcgaggaaatgacgcacttggccgcgcagcagaccggcttcccggaagagcgcgtgctcggcatggcgggtgtgctggactcggcgcgtttctgcgcgctcgtcggcctgacgggcaaggcgcgaccgcaggaggtccgtgccgtcgcgctgggcagtcacggtcccgagatggtgatcccgctcagccaggccttcgtcggcgaccgaccgatcgagtcgatgttcgacgccgagacgctcaaggccctggtcgagcgggcacgggagtcgggtggcgaggtcgtcaagctgctgcaaaagggcagtgcgtacttctcgcccgccgaatcggccgtgacgatggtgcgcgcgatggtgcgcgacagcggcgaggtcatcgccgcgtgcgtgcgctcgcgcggcgcctatggggcggtggacacgcgtgtcgggctgcccgtgcggctgcaccgtcgcggtctcaaggagatcgttccgctgacgctgcggccggcagaacagcaggcgttgcaggacgccgccgcgcggatcgccgcgcggatcgccgagctcccggccccttgctga

SEQ ID NO: 604 - protein, 432 aa, Methylibium petroleiphilum PM1 plasmid RPME01
MARMLTAADVEAAGGKLILAAGDRLTPLARDRARELGIVVEAAGLSSGVSTPSASPTSTSAPVVKSPLAAPAPAPVPAARPATPVAPPAATGSRPLALPPSGALYRRNALGPSAQSSRAVDGRPKAGVVGAGHVGAMTALRLAESDLFSEVALVDVVPGLAAGLALDMWHGAGLYGFSTRLSGSDDLVALAGAEYIVITAGKPRQPGMSRTDLTVVNAEIMTSVCRGIRTHAPNSTLVIVSNPLEEMTHLAAQQTGFPEERVLGMAGVLDSARFCALVGLTGKARPQEVRAVALGSHGPEMVIPLSQAFVGDRPIESMFDAETLKALVERARESGGEVVKLLQKGSAYFSPAESAVTMVRAMVRDSGEVIAACVRSRGAYGAVDTRVGLPVRLHRRGLKEIVPLTLRPAEQQALQDAAARIAARIAELPAPC

SEQ ID NO: 605 - DNA, 1038 bp, Methylibium petroleiphilum PM1 plasmid RPME01
atgcgagccgtcgtctacaagagccccgggcacgttgaagtcagcgacgtcccagaaccgcacattgtcgaggcgactgatgccattgtgaaggtcacgcacgccggcatctgcggcacggatttgcatgtagtgaagggcgacttcgcgggcatcacgccgggtgcggtggttgggcacgaattcgttggcgaggtcgtggaagtaggtcgtgcagttcaccgaattcgcttgggcgacaaggtgatgtcttctgatttcactgcctgcggccagtgccgctggtgcgatcgagccgaacactggcagtgcactgagcgggccttcttcggcacgggcaccgcattcggtcccagcctctccggagcgcaagcggagtacgtccgggtgccgtttgccgaccagaccctgggccaattgccggaacagtgtgcaccggaagcagccttgctgatgggtgacaacctcgccacaggctgggtcgcgatcgagcgcgctagcacccaagcaggggacttcgtcgtagtcatcggcggcggcgcggtcggccagctcgccgcattgtcggcgcaggtggccggtgcggggattgtcgtgctggtcgaacccaacgaaacgcgcagggcgttcgcgactgcccagggatccgtcgccgtgcacccggacgacgccgcggcgctggtgcggaaactgacggatggcgacggtgccgaggtcgtcgtcgaggcggtcggcggcaatggcccgctcgacttcgcaatgtcgctggcgcgcgcgcgcggacgcgtcgtctccgtgggcgcgcacgtagcagaaagctgggcctttccagtcggccgcgcgttcaaggacgagatgaccctcagcttcgctatcggcgacagcattcggctgcgtcgcaagctgttgcggctgatcaccagcggagccttcgatcccaccgtggtggtggacgcacgtggccgactggccgacgcgccggcgctgtacgaactgctcgccaagcagcagcgcctgaaggcagtgatgaccccatga

SEQ ID NO: 606 - protein, 345 aa, Methylibium petroleiphilum PM1 plasmid RPME01
MRAVVYKSPGHVEVSDVPEPHIVEATDAIVKVTHAGICGTDLHVVKGDFAGITPGAVVGHEFVGEVVEVGRAVHRIRLGDKVMSSDFTACGQCRWCDRAEHWQCTERAFFGTGTAFGPSLSGAQAEYVRVPFADQTLGQLPEQCAPEAALLMGDNLATGWVAIERASTQAGDFVVVIGGGAVGQLAALSAQVAGAGIVVLVEPNETRRAFATAQGSVAVHPDDAAALVRKLTDGDGAEVVVEAVGGNGPLDFAMSLARARGRVVSVGAHVAESWAFPVGRAFKDEMTLSFAIGDSIRLRRKLLRLITSGAFDPTVVVDARGRLADAPALYELLAKQQRLKAVMTP

SEQ ID NO: 607 - DNA, 1938 bp, Methylibium petroleiphilum PM1 plasmid RPME01
gtgtttgtcccggttgcgcccggcgcgctcgctctgctgatcgagggtgatcccgtcacgatcgaagcctcggactatctgggcgtgttctgcaagttctttgcgcttgctatacagacctgtgagcgtcagcggatcgccgtccagaacctcgacgaagtgcaggcgctgcaacgggtcgccacccgcattctcaagagccacgatctgagcgagatcctgctgctcatcacgcaggaggccaagcaactgctatcggcggacatctgcggcgtcctgttgcgggaggacgacaagatcgtcatgcgccgctgcgtcggcaaccgctcgccagaaacggcgaacctgcagatgggacccgggcaggggttggccgggctcgtcctagcacaccgcaagccagcttcggtcgaggactatgtcaccagcgaagccatcagccgcgacttcttccacctagccgaggccgaactcgttcgctcggcgtcggcggcccctctgctcggacgcgacgacatcatcggcgtgctggaagtctggcgtcgtcgaccctcgacattcacgccacaggacacgacccggctgacagcgcttgcgaacctgacatcgatcgccctagagaacgcggagctctacgccgggcaacgccgcatggtcgaggagttggggcaggcgcacgaagcgctcaaccagcgcttcgacgtcgtgcgcagcgtctcaagcctcacgcagacactcatgctgctgctgctccaaggcaccggattgaatgcgatcgtttctaccacgtccacgacgctgaagacggacgtggccatcatcgacagagacggcacactgttggcatggagtggtagtgaccgggcgcatggcctagtcgctgctgtggccgccgccgtcgtcgcgcaaggcgtcgccaccgcggggctgtcgatgacccagggcggcttgtcctggcgagttcaacccatctttgtcgagggcgaggcggtggcctggatcctcggaacgctcgaagacgcgcatcgctcggagctcatcgagttgacactcacgcaagttgcggtcatcgctgctttgcagcggctggaacagcgatcggcgagccgagcacgatcggagtcgatcgacgcaacgttgtgggatttgctgcgcgcggatgagaccgcacgtgcagcggccatcgaccgcgcggcagatctcaagctggatctggagggcccgatgcggctctacctctgcgaactcggcgccacggttccgggatctgcgcagagctcgggctctatccttcggcagaagatcacacgtgcagtggagaccgtacgtggcgagaaggcgcgcgcgatcgcattgcagggcatctcgatcgccgtgttgtgttccgatcaggcgctcgacgatgccgaacgatttgctaagggtctcgcagaagccatcagcgacggtcttggtggacgccaggttgtggtgggtgggagcagccgctgccacgttccccgtgctctcgcaatcgcataccgggaggcgcagatcgcgctggatgtctcacggcagatgggcaagaccgcctctgtcgtgtacgaccgtgcaggcgtagtcggcatgttgctgagtctgcgccatgatgtcggcatgcggcgattcctggaactgaaccttggtgagttgctgaacgaggaaccgaagcagcgcgacctcttcttgcagacgctgcgcgtctacttcgacgtgaactgttcacacgaagcagcgtcgcagaggcttggtgtgcacagaaagacggtcgcacaccggcttggtcgaatctccgatctgacgggcctggatctcagtacgcacgacgaccggttggtcgcggacctttcgctgtacgtcttccagatgctgaacaacggtacagcatccggcgatgcagaggatcggcgcgtcaggtag

SEQ ID NO: 608 - protein, 645 aa, Methylibium petroleiphilum PM1 plasmid RPME01
MFVPVAPGALALLIEGDPVTIEASDYLGVFCKFFALAIQTCERQRIAVQNLDEVQALQRVATRILKSHDLSEILLLITQEAKQLLSADICGVLLREDDKIVMRRCVGNRSPETANLQMGPGQGLAGLVLAHRKPASVEDYVTSEAISRDFFHLAEAELVRSASAAPLLGRDDIIGVLEVWRRRPSTFTPQDTTRLTALANLTSIALENAELYAGQRRMVEELGQAHEALNQRFDVVRSVSSLTQTLMLLLLQGTGLNAIVSTTSTTLKTDVAIIDRDGTLLAWSGSDRAHGLVAAVAAAVVAQGVATAGLSMTQGGLSWRVQPIFVEGEAVAWILGTLEDAHRSELIELTLTQVAVIAALQRLEQRSASRARSESIDATLWDLLRADETARAAAIDRAADLKLDLEGPMRLYLCELGATVPGSAQSSGSILRQKITRAVETVRGEKARAIALQGISIAVLCSDQALDDAERFAKGLAEAISDGLGGRQVVVGGSSRCHVPRALAIAYREAQIALDVSRQMGKTASVVYDRAGVVGMLLSLRHDVGMRRFLELNLGELLNEEPKQRDLFLQTLRVYFDVNCSHEAASQRLGVHRKTVAHRLGRISDLTGLDLSTHDDRLVADLSLYVFQMLNNGTASGDAEDRRVR

SEQ ID NO: 609 - DNA, 1902 bp, Haliangium ochraceum SMP-2, DSM 14365"
ttgctcctggccctggcactgggcctgggcgcgagcgcctgcggcaccgcgcccggcagcgactcgggcaacaaccccgaccccggccccggccccgatcccatcccgcgcctgcccgagcacggcgagagctggaccgtgctggtgtacatggtcgcggacaacgacctcgagccctttggtctcgaagacctcgaggagatgacgcgcgccggcgccagcgacgacttccgcatcgtcgtacagtcggaccgcgccagcgactacagcgacgacggcgtcggcggcctgcccgactggcagagcaccaaacgcctgctggtgcagcaggacgccctggtcgagctcgacgacctcggcgaacgcaatatgggcgaccccgccaccctggccgaattcatcacctggggcgtcaacagctacccggccgaccgctacgccctggtgttctgggatcacggcagcggctgggtgggcttcggcggcgacgaatcgaccagcgaccacgaccgcctcgacatcgccgagctgcgccgcggcatcgaccagggcctggccggcaccgcgctcgagggcttcgcgctcatcggcttcgacgcctgcctgatggccaccttcgagctcgcgctggccatgcgcgactacggcgcctacctgctggcctccgaagagctcgagcccggccacggctgggactacgaacacctgcgcgggctgcgcgacgatcccgcgcgcggcccggtcgccatgggcgagctgctcatggctgggttcgccgagcaggccgcggcccaggacaccgacgcgaccatcaccctgtcgctggtcgacctgcaggcgctggcgccgctcgagagcgcggtcgacgccctggccgagcagctgcgccgcgaattcgatatcaccgccgcctacctcggccgccagcgccaggcctcgcagcgcttcggcgagaccgccgacctcagctacgcctccaacctggtcgatctcggcgacctcgctggacgcctcggcctggattatggaccgctgtccgaaactaccggcaaggtgcgcgcggccctgcgcggcgcggtcgtcgccgaggtccacggcgcggccatcgaccacgcctacggcctgtcgatctacttcccgccgcagcggccctactacgacatcggctaccgcgacatcgccggcgacagcgcctggaaccgcatgctcgaggactactacgacatgggcgagagcggcctgttcgcgccgccgcgcttcaccaaccccggcggcgtcgccgatgtcgagttctaccaggacggcatggcgctgttcggcgacctggccaccgacggcgccgagaacatcgccgaggccctgctctactacggcgtggtgagcgacgacggccgcgaggtgttcctgctcggcgaggaacccgccaacgacagcgccacctcggtcgacggtttttgggactacagcgcgctgaccatccagcaaggcggcgcgttcagctacctctacatcagcatcgacgccctcgacggcggcgacatcgcgctcaccatccccttcgcctacgtcccgcccggcggcggcgagccgctgttcgccctgctggtgtacgtactcgacagcgactactacgtcctgcaggagacctattacctgttcagcgacgccggcccgggcgagttcacgccgcagatcggcggcgtactcgatcccctcggcctgattatcgaccaggcgggcgaataccagtgggactacctgtccgataacagcttcgaccccacgcgccccttcgagctgcgcttcgaagagctgccgctcggcatcatcggctacctcgagctcgaggtcagcgacttcgccggcaacgtcgactacgtgtacttcgagggcgaagtctga

SEQ ID NO: 610 - protein, 633 aa, Haliangium ochraceum SMP-2, DSM 14365"
LLLALALGLGASACGTAPGSDSGNNPDPGPGPDPIPRLPEHGESWTVLVYMVADNDLEPFGLEDLEEMTRAGASDDFRIVVQSDRASDYSDDGVGGLPDWQSTKRLLVQQDALVELDDLGERNMGDPATLAEFITWGVNSYPADRYALVFWDHGSGWVGFGGDESTSDHDRLDIAELRRGIDQGLAGTALEGFALIGFDACLMATFELALAMRDYGAYLLASEELEPGHGWDYEHLRGLRDDPARGPVAMGELLMAGFAEQAAAQDTDATITLSLVDLQALAPLESAVDALAEQLRREFDITAAYLGRQRQASQRFGETADLSYASNLVDLGDLAGRLGLDYGPLSETTGKVRAALRGAVVAEVHGAAIDHAYGLSIYFPPQRPYYDIGYRDIAGDSAWNRMLEDYYDMGESGLFAPPRFTNPGGVADVEFYQDGMALFGDLATDGAENIAEALLYYGVVSDDGREVFLLGEEPANDSATSVDGFWDYSALTIQQGGAFSYLYISIDALDGGDIALTIPFAYVPPGGGEPLFALLVYVLDSDYYVLQETYYLFSDAGPGEFTPQIGGVLDPLGLIIDQAGEYQWDYLSDNSFDPTRPFELRFEELPLGIIGYLELEVSDFAGNVDYVYFEGEV

SEQ ID NO: 611 - DNA, 639 bp, Haliangium ochraceum SMP-2, DSM 14365"
atgtcgatcaccctgcggacgtacattttcctcgacgcgttgcagccccagctcgcgaccttcatcggcaagaccgcgcgcggtttcctgccggtccccggccaggcctcgctgtgggtcgagatcgcgccgggtatcgcgatcaaccgggtcaccgacgcggcgctcaaagccaccaaggtgcagcccgcggtgcaggtggtcgagcgcgcttacggcctgctcgaggtgcatcacttcgatcagggcgaggtgctcgccgccggcagcaccatcctcgacaagctcgaggtgcgcgaggaaggccggctcaagccgcaggtgatgacgcaccagatcatccgcgcggtcgaggcctatcagacgcagatcatcaaccgcaactcgcagggcatgatgatcctgcccggcgagtcgctgttcatcctcgagacccagcccgcgggctacgcggtgttggccgccaacgaggccgaaaaagcggccaacgtgcacctggtcaacgtcacgccctacggcgcctttggccgcctgtatctggccggctccgaggccgagatcgacgccgccgccgaggccgccgaggccgcgatccgcagcgtgagcggcgtggcgcaggagtcgttccgcgaccgctga

SEQ ID NO: 612 - protein, 212 aa, Haliangium ochraceum SMP-2, DSM 14365"
MSITLRTYIFLDALQPQLATFIGKTARGFLPVPGQASLWVEIAPGIAINRVTDAALKATKVQPAVQVVERAYGLLEVHHFDQGEVLAAGSTILDKLEVREEGRLKPQVMTHQIIRAVEAYQTQIINRNSQGMMILPGESLFILETQPAGYAVLAANEAEKAANVHLVNVTPYGAFGRLYLAGSEAEIDAAAEAAEAAIRSVSGVAQESFRDR

SEQ ID NO: 613 - DNA, 255 bp, Haliangium ochraceum SMP-2, DSM 14365"
atggtcgaggccgccgacgccatggtcaaggccgccaaagtcgaactgatcggctacgagaagaccggcggcggctacgtcaccgccgtggtccgcggcgatgtcgccgcggtcaaggccgccaccgaggccggccagcgcgcggccgagcgcgtcggcgaagtcgtcgccgtgcacgtcatcccgcgcccgcacgtcaacgtcgacgcggcgctgcccctgggccgcaccccggggatggacaagagcgcgtag

SEQ ID NO: 614 - protein, 84 aa, Haliangium ochraceum SMP-2, DSM 14365"
MVEAADAMVKAAKVELIGYEKTGGGYVTAVVRGDVAAVKAATEAGQRAAERVGEVVAVHVIPRPHVNVDAALPLGRTPGMDKSA

SEQ ID NO: 615 - DNA, 291 bp, Haliangium ochraceum SMP-2, DSM 14365"
atggtcctcggcaaggtcgtcggcacggtggtggcgtcgcgcaaggagccccgcatcgaggggctcagcttgctgctcgtgcgcgcctgtgaccccgacggcacgcccacgggcggcgcggtggtgtgcgcggacgcggtcggcgccggcgtcggcgaggtcgtcctgtacgcctcgggcagctcggcgcggcagaccgaggtcaccaacaaccgcccggtggacgcgaccatcatggccatcgtcgacctggtcgagatgggcggcgacgtccgcttccgcaaggactga

SEQ ID NO: 616 - protein, 96 aa, Haliangium ochraceum SMP-2, DSM 14365"
MVLGKVVGTVVASRKEPRIEGLSLLLVRACDPDGTPTGGAVVCADAVGAGVGEVVLYASGSSARQTEVTNNRPVDATIMAIVDLVEMGGDVRFRKD

SEQ ID NO: 617 - DNA, 1458 bp, Haliangium ochraceum SMP-2, DSM 14365"
gtggctctgcgcgaggatcgcatcgccgagatcgtcgagcgcgtgctcgcgcgcctcgacggcaactccggctccagcgccgctcctcacagcggtagcggcgcgcccgcggccacggctggcggcgcgtcactcgacattccgcgcggcaccctgggcgtgtacgccgacgctgacgccgcggtcaacgcggcccggcgcggcttcgcggccaacgaggcgctgccgctgcgcacccgccaggcgatgatcgacgccatgcgcaaggtggcgcgcgcgcacatccccgagctggcgcgctacgcggtcgccgagaccggcctgggccgctacgaggataagctggccaagaacgagctggtcatcgccaagaccccgggtcccgagatcctggcgccggtggcgtacacgggcgacgacgggctcacgctcaccgagcgcgcgccctacggcgtcatcggcgcgatcacgccgtgcaccaaccccaccgagacggtcatctgcaacgccatcggcatgctctcgggcggcaacgcggtggtgttcaacgtccacccctcggccgcgcgggtgtgcaactggctggtgcatctgctcaacgaggccatcatgagcgtcggcgggccgcgcgacgccatcaccagcgtcgagtcgccgaccatcgacagcgcccagaccctgatgacccacgcgggcgtgcgcctggtggtggtcaccggcggcccgggcgtggtgcgcgcggccatgaagtcgggcaagaaggtcatcgccgccgggcccggcaaccccccggccgtggtcgacgagaccgccaacctggccaaggccgcggccgcgatcatcaagggcgcgtcgatcgacaacaacatcatctgcaccgccgagaaggagatcgtcgcggtcgccagcatcgccgacgagctgtcgcgcctgctcggccagcgcggcgccctggtgctcggcgacgctcaggtgcgcgcgctcgagcgggtggtgctcgacggcgagcacgtcaacaaggagtgggtgggcaaggacgcctcgcgcatcgccgagcagatcggtctgcgcggccacggcagcgacctgcgcctgctggtgtgcccggtggacgagggccaccccttcgtgcagcacgagctgctcatgcccgtgatcggtttggtacgggtgtccgacgccaccgaggccatggccacggcggtgcgggtcgagcacggcttctgccacaccgcggtcatgcactcgacgcatatcgaccggctctcggccatggcgcgggtgtgcaacgcctccattttcgtcaagaacgattgcaacctggccgggctcggtctgggcggcgagggctttacttccttcacgattgcgagcccgaccggcgagggcctcaccacggcccgcgacttcacgcgcgtgcgccgctgcacgctcaaggagtcgttccgcttcgtgtag

SEQ ID NO: 618 - protein, 485 aa, Haliangium ochraceum SMP-2, DSM 14365"
VALREDRIAEIVERVLARLDGNSGSSAAPHSGSGAPAATAGGASLDIPRGTLGVYADADAAVNAARRGFAANEALPLRTRQAMIDAMRKVARAHIPELARYAVAETGLGRYEDKLAKNELVIAKTPGPEILAPVAYTGDDGLTLTERAPYGVIGAITPCTNPTETVICNAIGMLSGGNAVVFNVHPSAARVCNWLVHLLNEAIMSVGGPRDAITSVESPTIDSAQTLMTHAGVRLVVVTGGPGVVRAAMKSGKKVIAAGPGNPPAVVDETANLAKAAAAIIKGASIDNNIICTAEKEIVAVASIADELSRLLGQRGALVLGDAQVRALERVVLDGEHVNKEWVGKDASRIAEQIGLRGHGSDLRLLVCPVDEGHPFVQHELLMPVIGLVRVSDATEAMATAVRVEHGFCHTAVMHSTHIDRLSAMARVCNASIFVKNDCNLAGLGLGGEGFTSFTIASPTGEGLTTARDFTRVRRCTLKESFRFV

SEQ ID NO: 619 - DNA, 618 bp, Haliangium ochraceum SMP-2, DSM 14365"
atggaccacgcgcccgaaagattcgatgccacgccgccggcgggggagcccgatcgcccggcgctcggcgtgctcgagctgacgtcgatcgcgcgcggcatcacggtcgccgacgcggcgctcaagcgggcgccctcgctgctgctgatgtcgcgcccggtgtcgagcggcaagcacctgctgatgatgcgcggacaggtggccgaagtcgaagagtcgatgatcgcggcgcgcgagatcgcgggcgcgggctcgggggcgctgctcgatgagctcgagctgccctacgcccacgagcagctctggcgctttctcgacgcgcccgtggtcgccgacgcctgggaagaggacaccgagtcggtgatcatcgtcgagaccgcgaccgtgtgcgcggccatcgacagcgccgacgccgcgctcaagaccgcgcccgtggtgctgcgcgatatgcgcttggccatcgggatcgccggcaaggccttcttcacgctcaccggtgagctggccgatgtcgaggccgcggccgaggtcgtgcgcgagcgctgcggcgctcggctgctcgagctggcgtgcatcgcgcggccggtcgacgagctgcgcggccgcctgttcttctga

SEQ ID NO: 620 - protein, 205 aa, Haliangium ochraceum SMP-2, DSM 14365"
MDHAPERFDATPPAGEPDRPALGVLELTSIARGITVADAALKRAPSLLLMSRPVSSGKHLLMMRGQVAEVEESMIAAREIAGAGSGALLDELELPYAHEQLWRFLDAPVVADAWEEDTESVIIVETATVCAAIDSADAALKTAPVVLRDMRLAIGIAGKAFFTLTGELADVEAAAEVVRERCGARLLELACIARPVDELRGRLFF

SEQ ID NO: 621 - DNA, 1866 bp, Haliangium ochraceum SMP-2, DSM 14365"
atgttcacggcctcgcctccggcggggagttcgaccctgcgcgcgctcggcgccgcgtccgctgccggcgagtccgatgatgactccgaggaggccgggaccggcacggcggcggtctcgctgctgccggcggaagtgaccggctcgacggtctctagtacctggtcgaaacgcgaggtgttgcgggcggcgggggcggcgcgcagcccggtaccggttccggtgagcgagtgcgcgctcgagcagaccgggccgctggtgagcgcgggcctgctgcgcgaggatcgcagccgcgcgggcatgtttttgcggctgacgctgtcggtcatcgcggcgtcgtcgtgttcgctgctgttcatcgacggcgatcccttggccgagggcatcgcggccgccggcatggcgtataccgccgcggtctttatctggtatctgcggcgctcgcggggcgcggcggcgccgagcgatcgccagtcggcttttctcgtggtgtcgacgctgctggcctcctacagcacggtctatctgtggggtctgctgtcgccgatggtgatcatcttcaccctgtcgctggcggtcctcggacagtcggtccgcgcacggccggcgcgggctggctatctcgcctgcgcgtgcgcgcagctcggcctgtcgctggcgctggcgctggggctggtgcgcgatcgcggtctgattccctttgataccctggggccggtcgagatcgtggtcagtcagttggccgtgcacgcgatgtatctgatcgcgtttctggtggcgcggcagagtcgccgcgcggccatcacggcgatggcccagctcgagcaggcggcgcgcgagaccgagcgccgcgacgtgctgctcgaggaggcccggcaggagctcgacgcggccctgcgcgtgggcgcggccgggcgctacaccggccagcgcatgggctccttccgcctcggcgtgctcatcggcaacggcgccatgggcgaggtctacgaggccgcgcatcacgagaccggcgcgctggccgcggtcaagctgctgcaccgccacctgctgctcggccagcgccaggtgcagcgctttctgcgcgaggccgagttcgcggtcaagctgtgctcgccgcacgtggtgcgcgtgctcgagtacgggcgcgataccgaggaggcgccgtatctggccatggagcggctcgacggcgtcaacctggccgagtacctgcgcgcccgcgagcgcctgtcgctgcccgaggtggtcaccttggtcgagcacatcgccaccgggctggaggcggcctggcaggccggcatcatccaccgcgatatcaagccgcagaacgtgttccgcgccgacgcctcggccgcgcggccgtgctggaagatcgtcgatttcggcgtgtccaagatggccgagcagagcgtgtcgctcacccacggcaacatcgtcggcacgcccagctacatggcgcccgagcaggtcgagggcggcgaggtcgaccaccggtccgatctcttcgccctggccgcggtggcctatcgcgcgctcaccggtcgcccggcctttggcggcaccgagctgtccgcggtgctgtaccgtgtggtccaccgcatgcccgaggcgccctcgctgctgagtacggtgcccgcggacatcgacgcggtgttcgcgctggcgctggccaaatcgccgggccagcgcttcgcctcgggcagcgagctgagccgggcgctgcgcgtggccgcggccgggaacctgcccgaggagctgcgcgcgcgcgcccgcacactgctcgcccggcacccgtggaacacggtcgcgcggccgattcccgagcgcccggcgaccgtcgacatcgacacccgcgagctgtga

SEQ ID NO: 622 - protein, 621 aa, Haliangium ochraceum SMP-2, DSM 14365"
MFTASPPAGSSTLRALGAASAAGESDDDSEEAGTGTAAVSLLPAEVTGSTVSSTWSKREVLRAAGAARSPVPVPVSECALEQTGPLVSAGLLREDRSRAGMFLRLTLSVIAASSCSLLFIDGDPLAEGIAAAGMAYTAAVFIWYLRRSRGAAAPSDRQSAFLVVSTLLASYSTVYLWGLLSPMVIIFTLSLAVLGQSVRARPARAGYLACACAQLGLSLALALGLVRDRGLIPFDTLGPVEIVVSQLAVHAMYLIAFLVARQSRRAAITAMAQLEQAARETERRDVLLEEARQELDAALRVGAAGRYTGQRMGSFRLGVLIGNGAMGEVYEAAHHETGALAAVKLLHRHLLLGQRQVQRFLREAEFAVKLCSPHVVRVLEYGRDTEEAPYLAMERLDGVNLAEYLRARERLSLPEVVTLVEHIATGLEAAWQAGIIHRDIKPQNVFRADASAARPCWKIVDFGVSKMAEQSVSLTHGNIVGTPSYMAPEQVEGGEVDHRSDLFALAAVAYRALTGRPAFGGTELSAVLYRVVHRMPEAPSLLSTVPADIDAVFALALAKSPGQRFASGSELSRALRVAAAGNLPEELRARARTLLARHPWNTVARPIPERPATVDIDTREL

SEQ ID NO: 623 - DNA, 1413 bp, Haliangium ochraceum SMP-2, DSM 14365"
atggacgaccgctccacggatagagacctgcgcgcggccacggcgcgcctcaccgatgcctcgctcgatgatctgtacaccgagcatctggccacgctgcaggacgcctacggcgccgcgctcgaggagcaaggcttcgacgccgtgctgatccacgccggcacgccggccaagcgccacgaattcgacgacgcctactggccgctgtgccccacgcccgcgttcacccactgggtgccgtggcacaaggacgacgccgcgctgttgattcagccgggcaagcgcccgcgtctgatcttcagcgatcccgacgatttttggcacagcgcggcggcgcccgagagcgagcacttctggggcggcttcgacgaggtcgagctcgacgacgccgcggccgtggacgcgggcatcggccgcgagctgcgctcctccgatcgcgccgatgcgcgcatgcgggcggcctttatcggcgccgacggcgaccgcgcgcgggcctggggcttcgccgaggagaccgtcaacccggccgggctcacggccgccctcgagcgcgtgcgcgtgcgcaagaccgcctacgagctgcgctgcctgggcgaggccagccgtcgcgcggccatcggccatcaggcggtccacgaggcctttttggccgacgaggccttttccgagttcgacctgcacctgcgctacctggcggccaccggccaggacgacgccgagaccccgtacaagaatatcgtcgccctggacgaaaacgcggccgtgctgcaccacctgcgctacacgcgcgagcgggcgcggaccaaaaaccgctcgctgctgatcgacgccggcgccacctacctgggctacgccagcgacatcacccgcacctacgtcaagggcagcggccgcgtggtcgaggtctttggcgcgctgatcgcggccgtcgagtcgctgcaggccgaggtgtgcgcgcgcatccagcccgggctggcctacgaggccctgcacgaccagtcgcacgagctgctggccgagcagctccgcaccctcgagatcagcgacgcctcggtcgaggagctgctcgagagcggcgccacgcgcgtgttcctgccgcacggcctgggccattcgctgggcatccaggtgcacgacgtcggctgtcgtctcagcccgccgcggcccgagaatcgctatctgcgcaacaccagcgtcatcgaggccgggcaggtgttcaccatcgagcccggctgctatttcatcgagagcttgctcgccgatctgcgcaagcgcccggtggccgagcgcatcgactgggagctggtcgccgagctgagcgcgtttggcggcgtgcgcatcgaggacaacctggcggtgctcgagcgcggcacgctcaacctcacccgtgacaactggccgagcgcgccgtag

SEQ ID NO: 624 - protein, 470 aa, Haliangium ochraceum SMP-2, DSM 14365"
MDDRSTDRDLRAATARLTDASLDDLYTEHLATLQDAYGAALEEQGFDAVLIHAGTPAKRHEFDDAYWPLCPTPAFTHWVPWHKDDAALLIQPGKRPRLIFSDPDDFWHSAAAPESEHFWGGFDEVELDDAAAVDAGIGRELRSSDRADARMRAAFIGADGDRARAWGFAEETVNPAGLTAALERVRVRKTAYELRCLGEASRRAAIGHQAVHEAFLADEAFSEFDLHLRYLAATGQDDAETPYKNIVALDENAAVLHHLRYTRERARTKNRSLLIDAGATYLGYASDITRTYVKGSGRVVEVFGALIAAVESLQAEVCARIQPGLAYEALHDQSHELLAEQLRTLEISDASVEELLESGATRVFLPHGLGHSLGIQVHDVGCRLSPPRPENRYLRNTSVIEAGQVFTIEPGCYFIESLLADLRKRPVAERIDWELVAELSAFGGVRIEDNLAVLERGTLNLTRDNWPSAP

SEQ ID NO: 625 - DNA, 1380 bp, Haliangium ochraceum SMP-2, DSM 14365"
atgccgttgccaacgccgattcgcgtcccttcgtcgctgtcgccgtcgctggcccgggcgctgtcctggccgctggcctgggcgctggccctggtgctgctcgcgagcgggtgccgcggcgacgagcccgccgacgcaccgaagcagacccaggcgtccgaaaacactccggccgtgcgcgtgcagcgccgcagcaagccgcagcccgagatcgcgccgcccatggatgtggccgcgccgcccgcggacgcgcgcaagacgccctcgggcgtacccttcgcggtgctgggcgagggccagggtgaggccgaggtcacggccaacgacacggtccagctccacttcacagcctggaccctggccggcaagacccactacagcacgcgccaccgcgatcgtccgcagcgccgctatctgccgcagcagccggcggcctgggtcgagaccatcaccgatatgcgcatcggcgagaagcgtctggtgtggatgccggcggaggcctcgttttcggggcaccgcggcgacgccgagcccatggtctacgagatcgagctgatcgagatcgagccggcgccgccggtgcccgagaacctggccgcgccgtccgagggggccgagcgcacgcccggcggcgtcgcctaccagaccctggagcccggcgagggcggcgcagacgcccggccgcgcgcctgggatcgggtcaaggtgcaccagacttcgtgggaccaggagggccgcatgctgcacagcacgcacatgcgcaagcgcccgcagcaggtcgacctgatgcgggcgatgccgggtctgcgcgaggtgctcacggcgatgacgcccggccagcgggtgcgcgcctggatcccggccgagatgcgccgcgaccgcccgggcgtgccctccgagggcctggtggtcttcgagctcgagctgatcgaggtcgagcgccagaccgagccgcccaaggtacccgaggacgtggccgcgccgcccaagaacgccaagaagaccgcgaagggcgtgtggtatcgcgtgctcaaacagggcacgggcagccagcatcccacggccagcgactcggtgcgcgtgcactacaccgggtggaccagcgacggcgagatgttcgacagctcggtggtgcgcggcacgccgctgcgcttcgacctcggcagcgtgatcccgggctggaccgacggcctgcagaccatgctcatcggcgagcgcacgcgcttctggatccccgaggagctggcctacaagggccgcaagaacgcgccccagggcatgctggtgttcgacgtcgagctgctcgagatcggcgatccggcgccgcgttccaaggccgaggccgagagcgggcgcgcggctcctgagagcgcgcaatga

SEQ ID NO: 626 - protein, 459 aa, Haliangium ochraceum SMP-2, DSM 14365"
MPLPTPIRVPSSLSPSLARALSWPLAWALALVLLASGCRGDEPADAPKQTQASENTPAVRVQRRSKPQPEIAPPMDVAAPPADARKTPSGVPFAVLGEGQGEAEVTANDTVQLHFTAWTLAGKTHYSTRHRDRPQRRYLPQQPAAWVETITDMRIGEKRLVWMPAEASFSGHRGDAEPMVYEIELIEIEPAPPVPENLAAPSEGAERTPGGVAYQTLEPGEGGADARPRAWDRVKVHQTSWDQEGRMLHSTHMRKRPQQVDLMRAMPGLREVLTAMTPGQRVRAWIPAEMRRDRPGVPSEGLVVFELELIEVERQTEPPKVPEDVAAPPKNAKKTAKGVWYRVLKQGTGSQHPTASDSVRVHYTGWTSDGEMFDSSVVRGTPLRFDLGSVIPGWTDGLQTMLIGERTRFWIPEELAYKGRKNAPQGMLVFDVELLEIGDPAPRSKAEAESGRAAPESAQ

SEQ ID NO: 627 - DNA, 1056 bp, Haliangium ochraceum SMP-2, DSM 14365"
atgagcgagcgcgcgagcgcaggcgacgcgctggccgatgtcgccgcgacgctgccggccgtggtcgccgcctacggctttgccggcgaggtgcagccgctggccggcgggctgatcaaccgcacctacgccatcgtcgaggacggcgtcccggtggccgtgttgcagcgcctgcatccggtgttctcgggcgaggtcaacctcgacatcgaggccgtgagcgcgcacctggccgcctgcggtatggacacaccgcggctgctgcgcacgcgcgccggcgagctgtggatcgaccaggccgacggcgcctggcgcgcgctgagcttcgtccccggccacacccggcaccgcgtggacgagcccgcgcaggcgcacgcggcggccgtgctggtgggccgctttcaccgcgcgctcgactcgctgcgccacgactacgtgcacgtgcgcgcgggcgtgcacgacaccgccgcgcatctggcgcgcctgcgcgggcacctcgaggccgcggccgagggcgacgagctgcagcgcgccggggtcgagctgggcggcgagatcctggccctcgcgaccgcgctgccggcgctgccgcaggtgcggatgcgccacagccacggcgatctcaagatctccaatctgctcttcgccgacgacggcagcgcgcgctgtctggtcgatctcgacaccgtgggccggcagagcgtggcctacgagctcggcgacgccatgcgctcgtggtgcaatccgcagggcgaggacgccgaccagatgcgcttcgacggcgacatattcgccgccgccatggcgggctatcgcgagggcgcgggcgatctcctggacgccgaggagcgcgccgccatcgtcgccggcaccgagtgggtgtgcgtggagctggccgcgcgcttctgcgtcgacgtcttcgccgatgcctacttcggctgggatgcgcagcgctacccgagccgtcgcgcgcacaacctggcgcgcgcccgcggccagctcatgctcgcccgctcggtgagcggaatgcgctcggccttgtacgctgccgtgtga

SEQ ID NO: 628 - protein, 351 aa, Haliangium ochraceum SMP-2, DSM 14365"
MSERASAGDALADVAATLPAVVAAYGFAGEVQPLAGGLINRTYAIVEDGVPVAVLQRLHPVFSGEVNLDIEAVSAHLAACGMDTPRLLRTRAGELWIDQADGAWRALSFVPGHTRHRVDEPAQAHAAAVLVGRFHRALDSLRHDYVHVRAGVHDTAAHLARLRGHLEAAAEGDELQRAGVELGGEILALATALPALPQVRMRHSHGDLKISNLLFADDGSARCLVDLDTVGRQSVAYELGDAMRSWCNPQGEDADQMRFDGDIFAAAMAGYREGAGDLLDAEERAAIVAGTEWVCVELAARFCVDVFADAYFGWDAQRYPSRRAHNLARARGQLMLARSVSGMRSALYAAV

SEQ ID NO: 629 - DNA, 2973 bp, Haliangium ochraceum SMP-2, DSM 14365"
atgccggttcgtcatgagctgtttgccgcggccctgtccgcggtagacgccgccgtggtgatgaccgatgctgacgaccggatcgcgtgggccaacgccgcggcgctcgcgctctttgactgggacgcagacggcgcctgcgggcagtcgctgagcgcggtgttgcgatttcaagggccgcgtccggtgctcgcgcccggcgagagcgcggcggtgtgcgtgctccacggcagcgcggaggcgtcgcgggtcgtgcacggcaccatgcgcagcgtggccgagaacagcggcgagcgcgtcggtcacgtgttcgtgtttaccgggcagcagacgtacgaggcgcgcgcgaagcattggctgtcgcagtcctcgctgctctacgcgctgctcggcagcaacggctatctgcacgaggtcggcacggtgtggagcgagcgcttcgcctacccgcgggcgatgctgctggagcggccgctgctcgagctcgtgcacgaggacgatcgcgaggccatggcgcgcagcctggcgcagatcgcgaactcggacgcggcctgcggggccgtcgaaacccgcttgcgccgcgctcagggcgggtatcgctggctgtcgtggtacatggtctacgacgccgaaaaccaatgcgtgcacctgagcgcgcaggatgtcagcgaggtcaagcgccaggagcgcctgctggccgagacccagggcgcggccagcatcggcggctgggagctcgacctgcacgacaccaccctgtactggaccgacgagatctatcgcattcacgatctgagtccggacagctaccttccgtcgcccgagaccgtgctcgcgttctacgagcccggctcggccgagcgtttcggacgcgcggtcaaacgagccgcgcgcggcgagggcggcttcgacatggaggtcgagctgcgcacgcccgcgggccgctcggtgtggtgccgcaacatcgggcatatgggcttcgagaacggcgaggtggtgcgcgtctttggctcgtgccaggacgtcaccgagcagcgcgccatccgcgaggcccagcgcgagagcgagcagcaactgcgctcgctggtgcgcgatgtcggcatcggcgtgatggtgcaggggcccgagggcgagatcctgcactgcaaccgcgcggccctcgacgccctggggttgagcgagcacgaggtcatcggcatgccggcgccgcggctgctggcgtacgccatccacgaggacggcacgccgctggcgctgggcagcgacccgctcagccgcgcactggaaaccggacaatcggtcaaagatgtcatcctgggcgtgccgcacaccggccgcgacgagccggtgtggctgctggtcaacgtggtctcgcgcatcgacgccgccggctctctgcgctgggccgtgtgctcgtttgccgatatttcggcgcgcaagcgggccgaggacaccgcccgcgagagcgcggccatgttccgcgcggtgtacgaaaacgccggcctgggcgtgctcatgcgcgacatcgacggcgccatcctcagcagcaacccgaccttttcgcgcatgctcggctacagcgccaagaccctgcgcagcatgccgctcgacgccatgctgcaccccggcgaccgagagctgggcggggacgagcacgaggcgctgctcgcgggcgagcgcgagacctacgaggtcgaccgccggtacgtgcgccgcgacggcgagatcgtgtggggacacgtgacggtctcggtggtgcgcggggccagcgacgagccgcagtacgtggtcgagatgatcgtcgatatcaccgatcgcaagcgcatggaggcgcagctcatgttgaccgaccgcctggcctcgctgggcaccatggcggcgggcgttgcccacgagatcaacaatccgctcacctggctgatgggcaacgtgtcatacgtgcgcgagagcctcgaggagctgcgcgacgagatcgcgctcgacgacgacagcgcggacgacctcgataaggcgctggcggatagcctggtgggcgccgagcgaattcggactattgtccaggatctgaagctgttcgcgcgcgatcgcgaggacgaagacggtatcgccgatctcggcgaggtcttgcactcgaccctgcgcatgctgcgcaacgagcttcatcaccgcgcggtgctggaacagaaggtcggcgacgtgccgcccgtggtcggcgaccccgcgcgcctggggcaggtgttcaccaatctgctggtcaacgccattcacgccttgcccgatcgcgatcgcgaggaaaaccgcatcgagattcgcggcgtgcgttcgggccgcggcgtggtcatcgagatttcggacaacggggtcggcatgtcgcccgagacccaggcgcgcatcttcgaccccttctacaccaccaaggaggtcgggcaggggaccgggctggggctgtcgatctgccacagcatcatcgcccagatcggcggacgcatcgaagtcgacagcgagctggggcaggggacgacctttcgcgtgcacctggctcgcgcccggcgcggctcgacctcgggcatcgcgctgacgctgatcgacgagatgccgaccgagcgcaagagcctgctgtgcatcgacgacgagccggacatggggctcaccttgaagcgcatgctgggcaagtatcacgacatcaccttcgagaccgatggcgagcgagcgctggagcgcctgcgcgagggcgagcgcttcgatgccatcatctgcgatttgatgatgccggggatgagcgggccggagttctatcactcgctgggtgaggtggcgccggagctggtatcgcattgcggctttgtcaccggcgggacctttaccccggcgacgcgcgcgttcgcggaagagcagcgcggctaccagctactgcaaaaacccttttcgcgcgaggcgatgtatatgttcatcgcccatctgaccgcgcgctga

SEQ ID NO: 630 - protein, 990 aa, Haliangium ochraceum SMP-2, DSM 14365"
MPVRHELFAAALSAVDAAVVMTDADDRIAWANAAALALFDWDADGACGQSLSAVLRFQGPRPVLAPGESAAVCVLHGSAEASRVVHGTMRSVAENSGERVGHVFVFTGQQTYEARAKHWLSQSSLLYALLGSNGYLHEVGTVWSERFAYPRAMLLERPLLELVHEDDREAMARSLAQIANSDAACGAVETRLRRAQGGYRWLSWYMVYDAENQCVHLSAQDVSEVKRQERLLAETQGAASIGGWELDLHDTTLYWTDEIYRIHDLSPDSYLPSPETVLAFYEPGSAERFGRAVKRAARGEGGFDMEVELRTPAGRSVWCRNIGHMGFENGEVVRVFGSCQDVTEQRAIREAQRESEQQLRSLVRDVGIGVMVQGPEGEILHCNRAALDALGLSEHEVIGMPAPRLLAYAIHEDGTPLALGSDPLSRALETGQSVKDVILGVPHTGRDEPVWLLVNVVSRIDAAGSLRWAVCSFADISARKRAEDTARESAAMFRAVYENAGLGVLMRDIDGAILSSNPTFSRMLGYSAKTLRSMPLDAMLHPGDRELGGDEHEALLAGERETYEVDRRYVRRDGEIVWGHVTVSVVRGASDEPQYVVEMIVDITDRKRMEAQLMLTDRLASLGTMAAGVAHEINNPLTWLMGNVSYVRESLEELRDEIALDDDSADDLDKALADSLVGAERIRTIVQDLKLFARDREDEDGIADLGEVLHSTLRMLRNELHHRAVLEQKVGDVPPVVGDPARLGQVFTNLLVNAIHALPDRDREENRIEIRGVRSGRGVVIEISDNGVGMSPETQARIFDPFYTTKEVGQGTGLGLSICHSIIAQIGGRIEVDSELGQGTTFRVHLARARRGSTSGIALTLIDEMPTERKSLLCIDDEPDMGLTLKRMLGKYHDITFETDGERALERLREGERFDAIICDLMMPGMSGPEFYHSLGEVAPELVSHCGFVTGGTFTPATRAFAEEQRGYQLLQKPFSREAMYMFIAHLTAR

SEQ ID NO: 631 - DNA, 255 bp, Haliangium ochraceum SMP-2, DSM 14365"
atgcgacgcgccaagatcgtgtgcaccctgggtccggcctcttcgacgccagagcgtatcggcgagctcatcgaagccggtatgaacgtggcccgtttgaacttctcccacggtgaccacgaaggtcacgcgaagatgctgcataccatccgcagcgaggccgagcgccgcggcaaaccggtggccatcctgctcgacctgcagggccccaagatccgtactggccgcttcaaggacggcgcggtcgagctgagc

SEQ ID NO: 632 - protein, 255 aa, Haliangium ochraceum SMP-2, DSM 14365"
MRRAKIVCTLGPASSTPERIGELIEAGMNVARLNFSHGDHEGHAKMLHTIRSEAERRGKPVAILLDLQGPKIRTGRFKDGAVELSKGQEFTITTDTEVLGDETQVSTTYPGLVGDVKVGDQILLDDGYLALAVTEVRDHAVKTVVVTGGTLKNNKGINLPHVEVSAPALSEKDRADLAFGVRMGVDYIALSFVRTPECVREARRLATVEGDHIPIIAKIEKPQALDRIEAIVDEADGVMVARGDLGVELGPEKVP

SEQ ID NO: 633 - DNA, 771 bp, Haliangium ochraceum SMP-2, DSM 14365"
atgatcgacaccgcccggctgctgcacgagcgcggctgggtcgccaaccacgacggcaatctgaccgtgcggctgggcgccaatcgcttcctggccacgcccacggcgacgtccaagcgcctggtcgacgacggcaacctcatcgaggtcgacgccgccggcaagcgcctggccggcaccgcgcgcccgttctccgagttcaacctgcaccgctgcatctacgagcgccgcagcgacgtcggcgccgtgctccacgcccacccgccaaaggccaccgcgatcgcgtgcagcgccgagaatcccatcgagcggccgttcatcgccgaggcggtggtgtcgatcgggccgcgcattcccaaggtgccctttgccgcgcctggcccggatgcggccgcggccgtggcgccctttgccaccgaggtcgacgccgtgctgctgggcaatcacggcgtgctcgcctggggcgcggatctcgagctggcgtatctgcggctcgagttggtcgaacatctggccacgatcgcgctcgccgccctgcccctgggcggaccgcagccgctgcccgaggccgcgctgcccaagctcctgcaagcgcgcgcgcgcgccggtctgggtcaggcggccgatgccgcgacgcagcatgcgcacgcctacgctgccgcgccgcggcagagcgcgagcgagagcgccagcggcggaggccgggacgatctcgtgcgcgtgatccgcgaggagctggtgcgcgcgctcgccggcgaagagtcgcgctag

SEQ ID NO: 634 - protein, 256 aa, Haliangium ochraceum SMP-2, DSM 14365"
MIDTARLLHERGWVANHDGNLTVRLGANRFLATPTATSKRLVDDGNLIEVDAAGKRLAGTARPFSEFNLHRCIYERRSDVGAVLHAHPPKATAIACSAENPIERPFIAEAVVSIGPRIPKVPFAAPGPDAAAAVAPFATEVDAVLLGNHGVLAWGADLELAYLRLELVEHLATIALAALPLGGPQPLPEAALPKLLQARARAGLGQAADAATQHAHAYAAAPRQSASESASGGGRDDLVRVIREELVRALAGEESR

SEQ ID NO: 635 - DNA, 1503 bp, Anabaena variabilis ATCC 29413
atgcttagtgtcttgatctttgccccattattgggtgcgctgctaattggtatattcccgtctggtattaatgggagaatttcccgtaatgtggcattgatttctgccagtgtaacttttctgtggtcggtgatactagctagccagtttcaaacaggagaagttaaccagcagtttagtgagttcttaccttggatagattccttaggattgagttataatcttggtgtggatggtctatctttgccgttgctggtgttgaatggattattaactgccattgccatttacagcagcgatgaatccttgcaacgtcctaagttttattattcattgatattggtgttgagtactggggtagcaggagcctttctggcgcaagatttactgctattcttcttgttttatgaactagaactcattcccctgtatctcttaattgctatttggggtggtgccagacggggttatgcagctacgaaattcttgatttacactgctttttcaggaattttgattttagccagtttcttgggcttggtttggttgagtggatctggtagctttgcactatcaaccttaaatgctcagtctctacctttagcaactcaactgctacttctagcggggattttagtaggtttcggcatcaaaatgcccttagttccttttcatacttggttaccagatgcacacgttgaagcctctacaccgatttctgtgttgctggctggtgtgctgttgaagttgggaacttatggcttattgcgatttggcatgaacttgttaccaacagcctggaattatttagcaccttggttggcggtttgggcagtggtgagtgtgttgtatggttcgtcatgtgcgatcgcgcaaacagacatgaaaaaaatggtagcctacagttcaataggacatatgggctatgtgttgttagcggcggcggcggctacaccattaagcaccttgggtgctgttatgcagatgattagccacggtttaatttcggcactgctgtttttgttggtgggggttgtgtataaaaaagcaggtagccgcgatttagatgtactccgaggtttgttgaacccagaacggggtatgcctgtaattggtactttgatgattgtcggcgtgatggctagcgccggaactccggggatggtgggatttatctccgaatttattatatttcggggttcctttgcggtttttccagtgcaaaccctgttgtcgatgattggcactgggttaacggcggtttacttcttaattctcgttaataaagcattttttgggcgcttatcggcccaggttatgaatttaccacggatttattggagcgatcgcgctcctgcttttatcttagcggtgctaattgtgatttttggtatccaaccttcttggttagcccgttggactgaacctaccattacagctatgtttagtgttgaaggtacggtggcaacagtctctttagataaagtaaagggtaaaagttaa

SEQ ID NO: 636 - protein, 500 aa, Anabaena variabilis ATCC 29413
MLSVLIFAPLLGALLIGIFPSGINGRISRNVALISASVTFLWSVILASQFQTGEVNQQFSEFLPWIDSLGLSYNLGVDGLSLPLLVLNGLLTAIAIYSSDESLQRPKFYYSLILVLSTGVAGAFLAQDLLLFFLFYELELIPLYLLIAIWGGARRGYAATKFLIYTAFSGILILASFLGLVWLSGSGSFALSTLNAQSLPLATQLLLLAGILVGFGIKMPLVPFHTWLPDAHVEASTPISVLLAGVLLKLGTYGLLRFGMNLLPTAWNYLAPWLAVWAVVSVLYGSSCAIAQTDMKKMVAYSSIGHMGYVLLAAAAATPLSTLGAVMQMISHGLISALLFLLVGVVYKKAGSRDLDVLRGLLNPERGMPVIGTLMIVGVMASAGTPGMVGFISEFIIFRGSFAVFPVQTLLSMIGTGLTAVYFLILVNKAFFGRLSAQVMNLPRIYWSDRAPAFILAVLIVIFGIQPSWLARWTEPTITAMFSVEGTVATVSLDKVKGKS

SEQ ID NO: 637 - DNA, 1857 bp, Anabaena variabilis ATCC 29413
atgaatcagtttctatttgcaacaagttggtgtgtgcctttttacagcttgctaggcgcactgttgacattaccttggggaataggaatagttcgacgtactgggcctaggcctgcggcgtattttaacttgttgactaccattgtgggctttgctcatagcctatgggtatttaaggatatttggagcagagaacaagaaaatttagtgattacttggtttcaagctgcggatttaaacttatcctttgcgttggaactctcacctgtcagtatgggagcgactgtattaatcacagggctgagtctgttagcgcaaatttatgccttgggttacatggagaaagattggtcattggcgcgttttttcggtttgcttggcttttttgaagcagcactgagcggtttagctattagcgactctttatttctcagctatggactattggaaatattgacgctttccacttacttgcttgtaggattttggtacgctcaaccgctagtggtaacggctgcaagggatgccttttggacaaagcgcgtgggtgacttgttgctgttgatggctgtggtcacactttccaccttggcgggtagtttgaacttttcggatttatatgagtgggtacaaactgcgaatttagaccccgtagctgcaacattattgtgtttagggttgattgcgggaccggctggtaaatgcgctcagttccccttgcatctgtggttggatgaggccatggaagggcctaacccagcgtctgtgatgcggaactcactggtggttgctggtggtgcttatctactatacaaactgcaaccaattttaattctgtcaccagtggtgttgaatgccttgattatcatcggtggagtgacagcaattggtgctagtttagtttctattgctcagactgatattaagcgggcgttgtctcattccaccagtgcatatatgggactggtatttctggcggtgggtttagaacagggtggtgtagctttgatgctattgttgacccatgcgatcgccaaagcattactatttatgagttctggatctatcatattcactacccatagtcaagacttgacagaaatgggtggtttatggtcgcggatgccagccactactactgcctttgtggttggttccgccgggatggtgacactcttaccattaggtagcttttgggcaatgttgtcttgggctgacggtttggtaagagttagcccttgggtaattggagttttaattctcgtcaatggtttgacggctttaaacttgacgcgagtatttagactggcattttggggtcaaccgcaacaaaagacccgccgtgcgccagaagttggctggacaatggctttcccaatggtgacattgacaatactgactttattattacccctgatgctacagcagtggtacttgttaccagcttgggaaagtattgactggtacgttgttttagttttggtttcctctacggtggctggtgtagtgattgggtcaacgattcatttacacaaagcttggtctcgttctacagtcctggcttggagattggtacaggatttattgggttacgacttctacattgatcgcatttatcgcctgacaatagtgagtgcagtagctttattgtcgaagatttcggcttggagcgatcgctatttagttgatggtttagtgaacttagtaggctttgctaccattttcggtgggcaaggcttgaagtatagcatctctggtcaatcccaaggatatatgttgactatcctcgccgtagttggtgctttaggctttttcattagctggtcattgggcttactggataaattgcctttttag

SEQ ID NO: 638 - protein, 618 aa, Anabaena variabilis ATCC 29413
MNQFLFATSWCVPFYSLLGALLTLPWGIGIVRRTGPRPAAYFNLLTTIVGFAHSLWVFKDIWSREQENLVITWFQAADLNLSFALELSPVSMGATVLITGLSLLAQIYALGYMEKDWSLARFFGLLGFFEAALSGLAISDSLFLSYGLLEILTLSTYLLVGFWYAQPLVVTAARDAFWTKRVGDLLLLMAVVTLSTLAGSLNFSDLYEWVQTANLDPVAATLLCLGLIAGPAGKCAQFPLHLWLDEAMEGPNPASVMRNSLVVAGGAYLLYKLQPILILSPVVLNALIIIGGVTAIGASLVSIAQTDIKRALSHSTSAYMGLVFLAVGLEQGGVALMLLLTHAIAKALLFMSSGSIIFTTHSQDLTEMGGLWSRMPATTTAFVVGSAGMVTLLPLGSFWAMLSWADGLVRVSPWVIGVLILVNGLTALNLTRVFRLAFWGQPQQKTRRAPEVGWTMAFPMVTLTILTLLLPLMLQQWYLLPAWESIDWYVVLVLVSSTVAGVVIGSTIHLHKAWSRSTVLAWRLVQDLLGYDFYIDRIYRLTIVSAVALLSKISAWSDRYLVDGLVNLVGFATIFGGQGLKYSISGQSQGYMLTILAVVGALGFFISWSLGLLDKLPF

SEQ ID NO: 639 - DNA, 309 bp, Anabaena variabilis ATCC 29413
atgccaattgcagttggaatgattgagactaaaggctttcccgcagtagtagaagctgctgacgcgatggtgaaagctgcccgtgtaactttggtaggatatgaaaaaattggtagtgctagagtcaccgtaattgtgcggggggatgtctctgaggtacaagcctccgtagctgctggcattgaagccgccagaagagtaaatggtggtgaagtagtatctacccacatcattgctcgcccccacgaaaacctggaatatgtcttaccgattcggtacacagaagccgtagaacagttccgcacctaa

SEQ ID NO: 640 - protein, 102 aa, Anabaena variabilis ATCC 29413
MPIAVGMIETKGFPAVVEAADAMVKAARVTLVGYEKIGSARVTVIVRGDVSEVQASVAAGIEAARRVNGGEVVSTHIIARPHENLEYVLPIRYTEAVEQFRT

SEQ ID NO: 641 - DNA, 345 bp, Anabaena variabilis ATCC 29413
atgtctattgcagtgggaatggtagaaacgctaggctttccagcagtggtagaagcagcagacgcaatggtgaaagccgctcgtgtcactctagtaggctacgagaaaatcggtagtggtcgggtaacagtaatcgttagaggcgatgtgtctgaagtacaagcatctgtagccgcaggtgtggaatcagttaagcgcgtcaacggcggacaagtattgtctacacacatcattgctcgtcctcacgaaaacttagaatacgtcctgccaattcgttataccgaagatgtagaacagtttcgggaaaatgtgaacgcaattcgtcctttcggcagaagaccataa

SEQ ID NO: 642 - protein, 114 aa, Anabaena variabilis ATCC 29413
MSIAVGMVETLGFPAVVEAADAMVKAARVTLVGYEKIGSGRVTVIVRGDVSEVQASVAAGVESVKRVNGGQVLSTHIIARPHENLEYVLPIRYTEDVEQFRENVNAIRPFGRRP

SEQ ID NO: 643 - DNA, 306 bp, Anabaena variabilis ATCC 29413
atgcaaattgctaaagttcgtggcacagtagttagcacccaaaaagatccaagtcttaggggtgtaaaactactgttgttgcaattagtagatgaagaaggaaacctcctccaaaaatacgaggtagccgcagataatagcgtaggtgcaggatttgacgaatgggtactgattagccgtggtagtgcggcacgtcaattacttggtaatgagcaacgtcctgtggatgcggcagtagtggcgataattgatactattcacgttgaagatcgtctgatttacagcaaaaaagaccaatatagatag

SEQ ID NO: 644 - protein, 101 aa, Anabaena variabilis ATCC 29413
MQIAKVRGTVVSTQKDPSLRGVKLLLLQLVDEEGNLLQKYEVAADNSVGAGFDEWVLISRGSAARQLLGNEQRPVDAAVVAIIDTIHVEDRLIYSKKDQYR

SEQ ID NO: 645 - DNA, 1671 bp, Anabaena variabilis ATCC 29413
atggcagtccgcagcacggcggcacccccaaccccgtggtcgaggagtttagctgaagcccaaatccatgaaagcgcctttgtacatccgttttctaacattattggggatgttcatatcggtgcaaatgtcatcattgctccagggacttcaatcagagccgatgaaggtacaccctttcatattggtgaaaataccaatattcaagacggtgtagtgattcacggtttagagcaaggtagagtcgttggtgatgacaaccaagaatactccgtttgggtgggtagcagcgcttccttgacacatatggcgttgattcatggccctgcttacgttggggataactcgtttattggttttcgctctacggtatttaatgccaaggtgggagcaggttgcatcgtcatgatgcacgctttaattaaggacgtagaagttccccctggtaagtacgttccttcaggagcgatcatcactaatcaaaagcaggccgatcgcttgccagatgtgcaacctcaagacagggattttgctcatcacgtaattgggattaatcaagcattgcgggctggatatctttgtgctgcggatagcaagtgtattgccccccttcgcaatgatcaagttaaatcttatacaagtaatacagttattgggttagaaaggagtagtgaagtggcaagcaacagcttgggtgcagaaaccatagagcaggtacgctatttattagagcaaggctataagattgggacagaacacgtagatcaaagaagatttcgtacaggttcttggactagttgccagccaattgaaggtagatccgtaggagatgccttagcagctttagaagcttgtttagctgaccatagtggtgagtatgtacgtttattcggcattgaccccaaaggtaaacggcgagttttagaaacaattatccaacgtcccgatggtgtggtggcaggttctaccagcttcaaagcgcctgctagtaacaccaatggcaatggtagctaccacagcaacggcaatggtaacggttatagtaacggtgcagccagtggtaaagtcagtgctgaaaccgtagaccaaattcgccagttattggctggtggttacaaaattggcacagaacacgtagatgagcgtcgcttccgtacaggttcctggaatagctgtaagccaattgaagcaaactccccaggtgaagtagtggcggctttagaagaatgtatcgacagtcatcaaggtgagtacatccgcctcatcggcattgacccgaaagccaaacggcgtgtattggaaagtattatccaacgtcccaacggtcaagtagctccatcgacgagtagccccagaaccgtcgtgagtgcctcatctgcttcatccggaacagctaccgcaacagctacccgcttaagtacagaagtagtagatcaggtgcggcaaatactgggtggtgggtataaactcagcattgaacacgtagatcaaagaagattccgtactggttcttggactagtaccggggcaatttccgctacttccgaaagagaagcgatcgcagtcatagaagcctccttatccgaatttgctggagaatatgtgcgcttgattggtatcgaccccaaagccaagaggcgagtgttggaaacaatcattcagcgtccatag

SEQ ID NO: 646 - protein, 556 aa, Anabaena variabilis ATCC 29413
MAVRSTAAPPTPWSRSLAEAQIHESAFVHPFSNIIGDVHIGANVIIAPGTSIRADEGTPFHIGENTNIQDGVVIHGLEQGRVVGDDNQEYSVWVGSSASLTHMALIHGPAYVGDNSFIGFRSTVFNAKVGAGCIVMMHALIKDVEVPPGKYVPSGAIITNQKQADRLPDVQPQDRDFAHHVIGINQALRAGYLCAADSKCIAPLRNDQVKSYTSNTVIGLERSSEVASNSLGAETIEQVRYLLEQGYKIGTEHVDQRRFRTGSWTSCQPIEGRSVGDALAALEACLADHSGEYVRLFGIDPKGKRRVLETIIQRPDGVVAGSTSFKAPASNTNGNGSYHSNGNGNGYSNGAASGKVSAETVDQIRQLLAGGYKIGTEHVDERRFRTGSWNSCKPIEANSPGEVVAALEECIDSHQGEYIRLIGIDPKAKRRVLESIIQRPNGQVAPSTSSPRTVVSASSASSGTATATATRLSTEVVDQVRQILGGGYKLSIEHVDQRRFRTGSWTSTGAISATSEREAIAVIEASLSEFAGEYVRLIGIDPKAKRRVLETIIQRP

SEQ ID NO: 647 - DNA, 747 bp, Anabaena variabilis ATCC 29413
atgtctgtgccgccactacgcctccacaacaactttgattcctacattagtggcgaggtgacaattcatccgagtgcagtaattgcaccaggggtgatactccaagcggctgcaaacagcaaaatcatcatcggggcaggagtctgtattggcatggggtctattctccaagtggatgagggaaccatagaagtagaagcaggagccagcttaggagcaggttttttgatggttggtcaaggcaaaattggcactaatgcttgcataggtgcagccacaacattatttaactcttctattcctccagccttagtagtgccaccaggttcgattttaggtgatacaactcggcaacttgccgccactgaatcaccagcaacatctacgaatcaggttgacgaggctacccaaaagcctaaagaaaatgaaagtaaggtgattacctcaactaccctttcagcatcagcttttgtggaatttaaacagcattcagtttctgtaacagaacccccaccatcaccagagaatcagtctgctaccgtagaagaaaatactactaatgggactgaccctaatgtgacagaacttagcccagaagattcagcatcggatcaatctgccactgaatcccctaatagcttcgggactcaaatttatgggcaagggagcatccaaagacttttggtgacattgtttcctcatagacaagccctaaataaccctgtctctgacgatagttctgagtaa

SEQ ID NO: 648 - protein, 248 aa, Anabaena variabilis ATCC 29413
MSVPPLRLHNNFDSYISGEVTIHPSAVIAPGVILQAAANSKIIIGAGVCIGMGSILQVDEGTIEVEAGASLGAGFLMVGQGKIGTNACIGAATTLFNSSIPPALVVPPGSILGDTTRQLAATESPATSTNQVDEATQKPKENESKVITSTTLSASAFVEFKQHSVSVTEPPPSPENQSATVEENTTNGTDPNVTELSPEDSASDQSATESPNSFGTQIYGQGSIQRLLVTLFPHRQALNNPVSDDSSE

SEQ ID NO: 649 - DNA, 783 bp, Anabaena variabilis ATCC 29413
atgtataatcagcgatctactaacacaaaccggacatatcgtcgtcaagacgacctcagggatacagccttggggttagtctctactcttagttttccggcgatcgtcggcacagctgacatgatgttgaaatcagctggggttcacctggttggttatgaaaaaattggtagtggtcactgtacggcgatcgtccggggtggaattgctgatgttcgtttggctgtagaatccggtgtgcaaactgctgaacagtttggacaactggtttctagcttggtgattccccgaccttttcctaatcttgatgtcgtgttgcccattactaaccgcctgagccagttaatggaggaaggtacatacagccgcttgagtaaccaagccattggtttagtagaaacgcggggctttccagcaatggtaggtgcttgtgatgccatgcttaaatcggctgatgtccaattggcatcctatgaaaaaattggtgcaggcttgtgtacagccattattcgtgggtctgttgctaacgtcgcagttgcagtggaagcaggaatgtttgaggctgaacgaattggggaactgaacgcagtgatggtaattcctcgcccactagatgaattggagcaaaccttgccgatcgctagttgttggatagagcatcagcaaccgttgagattgccggtgaacattagagagcaagttgccgaaagggaagtgttacagttaccagacttagccgctttgcctatgaaaatcacagaagaagtatggaacgatgaatga

SEQ ID NO: 650 - protein, 260 aa, Anabaena variabilis ATCC 29413
MYNQRSTNTNRTYRRQDDLRDTALGLVSTLSFPAIVGTADMMLKSAGVHLVGYEKIGSGHCTAIVRGGIADVRLAVESGVQTAEQFGQLVSSLVIPRPFPNLDVVLPITNRLSQLMEEGTYSRLSNQAIGLVETRGFPAMVGACDAMLKSADVQLASYEKIGAGLCTAIIRGSVANVAVAVEAGMFEAERIGELNAVMVIPRPLDELEQTLPIASCWIEHQQPLRLPVNIREQVAEREVLQLPDLAALPMKITEEVWNDE

SEQ ID NO: 651 - DNA, 951 bp, Anabaena variabilis ATCC 29413
ttgaaccaagcaacgctacaccagttgaaggtgttcgaggcggcggcacggcacggtagctttactcgtgctgctgaggagttatttctcacccaacctaccgtctctatgcaaatcaaacagctgacaaaatctgtaggtttaccactatttgagcaggtgggaaagcgcctatatttgaccgaagcaggacgagaattattcgcaacctgtcggcaaatatttgagactattgcccagtttgaaatgaaagtagctgatttaaaagggctaaaacaagggcaattaagattagcagtaatcaccactgctaaatattttattccccgcttattggggcctttttgccaactttatccaggcattgacatttcattacaagtcacgaaccacgaacgcatcctagagcggatgatgagtaatatggatgacttgtatattatgagtcaagtcccagagcatttggatgtaactagtcagccatttttagataatcctttagtagtatttgctcccgcaaatcatccactagcacaagaaaaaaatattcccatacaacggttgtccaatgaaccctttattatgcgggagccaggttcgggaacacgccgtgctgtacaaaatctgctggaagaacaaggtatttccgtaaaagtgaagctggaattaggtagtaatgaggcaatcaaacaagcgatcgccggtggactgggaatttctgttttatctcgacataccctattgtctgatgccgccgaattcagcattctggacgtgcagcacttccccattaagcggacttggtacatggtttacccgtctggcaaacagttatctattgtggctcgtacctactacgagtatttgctagatgcagccaaaaagtttgtagagcaaacagagcaactaaatttccctgttcctgtgcctgagtatagtgtagttgagtaa

SEQ ID NO: 652 - protein, 316 aa, Anabaena variabilis ATCC 29413
MNQATLHQLKVFEAAARHGSFTRAAEELFLTQPTVSMQIKQLTKSVGLPLFEQVGKRLYLTEAGRELFATCRQIFETIAQFEMKVADLKGLKQGQLRLAVITTAKYFIPRLLGPFCQLYPGIDISLQVTNHERILERMMSNMDDLYIMSQVPEHLDVTSQPFLDNPLVVFAPANHPLAQEKNIPIQRLSNEPFIMREPGSGTRRAVQNLLEEQGISVKVKLELGSNEAIKQAIAGGLGISVLSRHTLLSDAAEFSILDVQHFPIKRTWYMVYPSGKQLSIVARTYYEYLLDAAKKFVEQTEQLNFPVPVPEYSVVE

SEQ ID NO: 653 - DNA, 312 bp, Trichodesmium erythraeum IMS101
atgccaattgctgtgggaatgattgaaactagaggctttccagcagtagtagaagctgctgatgctatggtgaaagcagctagagttaccctagtaggttatgaaaaaataggtagtgctcgtgtaacagtaattgtccgaggagatgtttcggaagtacaagcttctgtcgcagcgggaatagagtcagctaaaagagttgatggtggtgaggtagtatcaactcatattattgctcgtccccacgaaaacttagagtatgtcttgccaattcgatataccgaagaggtagagcagttccgaacttattaa

SEQ ID NO: 654 - protein, 103 aa, Trichodesmium erythraeum IMS101
MPIAVGMIETRGFPAVVEAADAMVKAARVTLVGYEKIGSARVTVIVRGDVSEVQASVAAGIESAKRVDGGEVVSTHIIARPHENLEYVLPIRYTEEVEQFRTY

SEQ ID NO: 655 - DNA, 339 bp, Trichodesmium erythraeum IMS101
atgtcaattgcggtgggaatggtagaaaccctaggctttccagcagttgtagaagcggcagatgcaatggtgaaagcggcacgggtaactcttgttggctatgaaaaaattggtagtggtcgtgtaaccgtaattattcgtggagatgtatcagaagtacaagcttcagtagcagcaggagttgataacgttagacgggtgaatggaggccaagttatgtcaactcatatcattgcccgtcctcatgaaaacctagaatatgttctgcctattcgttatactgaggaggtttctcagttccgcgacagtactactgcagttcgttcagtaaacagataa

SEQ ID NO: 656 - protein, 112 aa, Trichodesmium erythraeum IMS101
MSIAVGMVETLGFPAVVEAADAMVKAARVTLVGYEKIGSGRVTVIIRGDVSEVQASVAAGVDNVRRVNGGQVMSTHIIARPHENLEYVLPIRYTEEVSQFRDSTTAVRSVNR

SEQ ID NO: 657 - DNA, 303 bp, Trichodesmium erythraeum IMS101
atgcaaattgccaaagttcgtggtaccgttgtcagcactcagaaagagcctaacttaaaaggaacaaaattacttctgctgcaattcatagatgaagaaggccatctactaccaaagtatgaagtagcagccgataatgtcggtgccggaatcaatgaatgggttttggttagccgtggtggagcagctcgtgaaataccagggagtgaaaaacttcctgtagatgctagagtagtagctattattgacacgataactgtggacaatcgcatgatctacggtaaaaaagacgaatatcgttga

SEQ ID NO: 658 - protein, 100 aa, Trichodesmium erythraeum IMS101
MQIAKVRGTVVSTQKEPNLKGTKLLLLQFIDEEGHLLPKYEVAADNVGAGINEWVLVSRGGAAREIPGSEKLPVDARVVAIIDTITVDNRMIYGKKDEYR

SEQ ID NO: 659 - DNA, 2019 bp, Trichodesmium erythraeum IMS101
atgccacaccgcaaacaaccagctccacccaccccctggtcaaaaaacttggcacagccgaagattgatgacacagcttatattcactccttttccaatatcattggagatgtccgtgttggagctaatgtattagtagctccgggcacatcaattcgtgcagatgaaggtactcccttctttattggagcaggaactaatatccaagatggagtagttatacatggtttagaacaaggacgagttataggagatgaccaacaaaactattctgtatggataggtacaaatgtttctatcactcataaagctttagttcatggtccttgctatatcggtgatgactgttttatcggctttcgttctacagtttttaactcccgcattggtgaaggatgtatagttatgcttcacgctctgatccaggacgtggaaattcctcccggtaagtatgtgccttcaggagcaattattacaaatcaacagcaagtaaatcgtttgtcagatgtactacccgatgatataaaatttgcccatcatgtagtgggaattaacgaatctttacgacaaggttatctgtgtgcgaataatatatcttgcattacccctattagaaatgaaatgaatattaattataaaaatggtaacggttacaacccttcaggaacaactggtagactaaccccagaagtagttgctcatgtaaaccagttagtatcccaaggatattatgttggtacagaacacgctgacacccgtcacttcaaaacaggttcctggaaaacttgttctccaattcaaagtagtcactcttcagaagtagtagcagctctagaagcttgtatacaagaacattctacagagtatgtgcggatgtttggtatagaccctaaagctaaacgtcgtatatctccaattatgattcaacgtcctgatggtaaaaaagttgctcaaaaatcaacgactggtaactacagtgttcctgctgctactggtactactagggttggaagtactactacccccaatactacaggtctaactccagaagtagtaacccaagttaattctttgctgtctcaaggatacaagattggtacggagtatgccaatgaacgtcgttttaaaactagctcttggcaaaacggtccgactatttctgagactaattctgcacaagttttggctgctctagaaaaatttttagcagaacacagtggtgaatatgtacgtttaattggtatagactctaaagttaaacgtcgtgttgcagaaataataattcaacgaccaggcgatagcccaattcaacaatgtgtatctacttctccaagttatcaagctcctgtatctactcatgcaggaattaatactcgattaagtcaggaagttgtagagcaagtacgttcattatttaatcaaggatatagaattagcttagaacacgctaatgaacgtcgctttaaaactagctcctggataagttgcgctcccatttctgctactaaccattctcaagcaatagctgaattagaacaagttttagcagaatataatggggaatatgtacgtttaattggtatcgatactcaagctaaacgtcgggtcatggaaagtttgattcaacaacccaatggtaaaggtgaaagatctgcttctcttaaggctacttctaatggagtagtcaatactactcaacaatctcctgtttctagtagtcaagtggctacaacaatagcccataaattaagtcaagaggctgtggaagaaattcgttctttgattgcaggtggttataaaattggtacagaatatgctgataaacgtcgttttaaaactagctcttggaaaacagatattcaaatagatggtaaacgagaggctgatgtttttccagtgcttgaagaaagtctggctcaccatgagggagaatatgtccgcttgataggtatagatccaaaagcgaaacgccgagtcttagaaaagattattcaacaacctaacggtaaggctaactga

SEQ ID NO: 660 - protein, 672 aa, Trichodesmium erythraeum IMS101
MPHRKQPAPPTPWSKNLAQPKIDDTAYIHSFSNIIGDVRVGANVLVAPGTSIRADEGTPFFIGAGTNIQDGVVIHGLEQGRVIGDDQQNYSVWIGTNVSITHKALVHGPCYIGDDCFIGFRSTVFNSRIGEGCIVMLHALIQDVEIPPGKYVPSGAIITNQQQVNRLSDVLPDDIKFAHHVVGINESLRQGYLCANNISCITPIRNEMNINYKNGNGYNPSGTTGRLTPEVVAHVNQLVSQGYYVGTEHADTRHFKTGSWKTCSPIQSSHSSEVVAALEACIQEHSTEYVRMFGIDPKAKRRISPIMIQRPDGKKVAQKSTTGNYSVPAATGTTRVGSTTTPNTTGLTPEVVTQVNSLLSQGYKIGTEYANERRFKTSSWQNGPTISETNSAQVLAALEKFLAEHSGEYVRLIGIDSKVKRRVAEIIIQRPGDSPIQQCVSTSPSYQAPVSTHAGINTRLSQEVVEQVRSLFNQGYRISLEHANERRFKTSSWISCAPISATNHSQAIAELEQVLAEYNGEYVRLIGIDTQAKRRVMESLIQQPNGKGERSASLKATSNGVVNTTQQSPVSSSQVATTIAHKLSQEAVEEIRSLIAGGYKIGTEYADKRRFKTSSWKTDIQIDGKREADVFPVLEESLAHHEGEYVRLIGIDPKAKRRVLEKIIQQPNGKAN

SEQ ID NO: 661 - DNA, 435 bp, Trichodesmium erythraeum IMS101
atgcaaaaaattctctttctttgtacaggtaattattaccgaagtagatttagtgagtatttattcaatgatttagcctcaaaaaaaggaataaaatggcaagcagattcacggggtttaaatgttgacccaaaatctggtaatgtgggagctatttcatcggaggtgctcaaaactttagcatctttaggtcttcagattgactctgtgtctttgagggaaccaatgcaggtgaaacaaacagatttagaaaatgctactgaaattattgctgttgatgaagttgctcatcgtcctttaatgcagtctaagtttcctgaatgggttgataaggttgaatattggggagttaaagatttggatgagcatcctgatcaacctcctcttttgcaactacaaaataatattcatttacttttggaaaaattagattaa

SEQ ID NO: 662 - protein, 144 aa, Trichodesmium erythraeum IMS101
MQKILFLCTGNYYRSRFSEYLFNDLASKKGIKWQADSRGLNVDPKSGNVGAISSEVLKTLASLGLQIDSVSLREPMQVKQTDLENATEIIAVDEVAHRPLMQSKFPEWVDKVEYWGVKDLDEHPDQPPLLQLQNNIHLLLEKLD

SEQ ID NO: 663 - DNA, 915 bp, Trichodesmium erythraeum IMS101
atgcagttgccaccactacaaccttttgcaaatattgagccttttgttagtggtgatgtaaaaattgacccaagtgcggcgatcgctcctggtgttattcttcaagctgctagtaactgtcagattattattggagcgggggtttgtattggtatgggagttattattcatgcttacagtggtaatattgaaattgaatcgggagctactattggttcaggagttttattagttggtaaaagtaagattggagctaatgtttgtattggttctttggcaactattctggaacagaatttagaatcagagaaagttgtattacctgcttctattattggtaactcagggcgacagttctcagacaattctactatatctttacctgatcaagattcaaatcaaagctatctattctcaaatgaaactcaagaaagtagttatagtttaaatttagctaatactgcttcatctactgaggaaacttcaacagaaactgaaaaggctaacactcaattaccattggctaatacttctttacctgctgaagaaactccaacagaaactgaaaaggctaacactcaattaccattggctaatacttctttacctgctgaagaaactccaacagaaactgaaaaggctaacactcaattaccattagctaatacttctttacctgttgaagaaactccaacagaaactgaaaaggctaacactcaattaccattagctaatacttctttacctgttgaagaaactccaacagaaactgaaaaggctaacacccaactacaagaagagtcacctccaaacattgatgctcaaatttatggtaaagaatatgtaaacaaaataatgcagactttatttccttataaaaattctttgagttctcatcctgatgatgaagactga

SEQ ID NO: 664 - protein, 304 aa, Trichodesmium erythraeum IMS101
MQLPPLQPFANIEPFVSGDVKIDPSAAIAPGVILQAASNCQIIIGAGVCIGMGVIIHAYSGNIEIESGATIGSGVLLVGKSKIGANVCIGSLATILEQNLESEKVVLPASIIGNSGRQFSDNSTISLPDQDSNQSYLFSNETQESSYSLNLANTASSTEETSTETEKANTQLPLANTSLPAEETPTETEKANTQLPLANTSLPAEETPTETEKANTQLPLANTSLPVEETPTETEKANTQLPLANTSLPVEETPTETEKANTQLQEESPPNIDAQIYGKEYVNKIMQTLFPYKNSLSSHPDDED

SEQ ID NO: 665 - DNA, 777 bp, Trichodesmium erythraeum IMS101
atgcaaacccacaataactataataagctagaatctatcgaatccccaattcagtttggagatgctgctcttggtttagtgacaactaggagttttccggccatagttggtactgctgatatgatgctaaagtcatctggtgtaattttggtaggctatgaaaaaattggtagtggatattgtacggcggtagttcgtggtggtattgctgatgttcgtttagcggtagagtctggagcaaaaactgctgaaaagtttggacaactgatttctaagactgttattcctcgacctttgcctaatttagaagttgtattacctattggtagccttttacttaaactatctcaaggtagagtgtctgatgagtttagacataaagcagttggtctaatagagactagaggttttccggcaatggtgggagcttgtgacgcgatgctcaaatctgctgatgtacagttgactgcttatcaaactacaggtgcaggtttatgtactgctattgttcgtggttcggtttctaatgtagcggtagctatagaaactggtatgtacgaagcagaaagaattggagaattaaatgctgtaatggtaattcctagagcattagatgatttagaaaaaacattacctatagctggtcatctgattaaagaaaaacctgaacctttacgtttaccaatagcagttaaagatcaggaaaaagagcttgtaagattaccagatttttcccaacttcctttaccgatcaaagaagaacttaaggataaataa

SEQ ID NO: 666 - protein, 258 aa, Trichodesmium erythraeum IMS101
MQTHNNYNKLESIESPIQFGDAALGLVTTRSFPAIVGTADMMLKSSGVILVGYEKIGSGYCTAVVRGGIADVRLAVESGAKTAEKFGQLISKTVIPRPLPNLEVVLPIGSLLLKLSQGRVSDEFRHKAVGLIETRGFPAMVGACDAMLKSADVQLTAYQTTGAGLCTAIVRGSVSNVAVAIETGMYEAERIGELNAVMVIPRALDDLEKTLPIAGHLIKEKPEPLRLPIAVKDQEKELVRLPDFSQLPLPIKEELKDK

SEQ ID NO: 667 - DNA, 255 bp, Trichodesmium erythraeum IMS101
ttgaattcttcttctgttcttactattgcaagcggaaatcaaaagaaggtatctgaaatattagagatgttagatgttctatctttaaaagtaaaaaaacaacccgaacatttaaatgtagaagagacaggcaaaacctattttgacaacgcttttttaaaagcaaaagcagcttctttagagactaagacttgggccttagctgatgactcagggcttgaggttgattatttagatggaagaccgggtatatat

SEQ ID NO: 668 - protein, 195 aa, Trichodesmium erythraeum IMS101
MNSSSVLTIASGNQKKVSEILEMLDVLSLKVKKQPEHLNVEETGKTYFDNAFLKAKAASLETKTWALADDSGLEVDYLDGRPGIYSARYAKNNDDKLIKLIRELSDIPYRSAKFISCMVLCDPEGKLVKDATGICWGEILKEPKYPNGEFESIFWVKEANCVYGELSHSQLSKLGSRGKAAKNIAPFLKREFGID

SEQ ID NO: 669 - DNA, 264 bp, Desulfotalea psychrophila LSv54
atgttttacgccgaaatatcagttaaaattcatctctacagacaagtggaagaaaaaataaccttaaaacttgctgaatattctcagcaaagacagtgccaaattgttaaaaaaaaagattttccccaaaaaaacaagaaaaagagggtgcagcggatgcttatggccgactttttaggaggaggatttggggtatttaatatatataggtggttttttctgttaaggggcttggaagattttaaaattttatttttattgtga

SEQ ID NO: 670 - protein, 87 aa, Desulfotalea psychrophila LSv54
MFYAEISVKIHLYRQVEEKITLKLAEYSQQRQCQIVKKKDFPQKNKKKRVQRMLMADFLGGGFGVFNIYRWFFLLRGLEDFKILFLL

SEQ ID NO: 671 - DNA, 285 bp, Desulfotalea psychrophila LSv54
gtgaatgtctggctcttgtgcagaaatgcaacaaatgtctttttttgtccttgtaatctgttaaaacattcttttgctggaatctgctttttccttgttgtcgagtccgtctttttgtttctaaatccttttaaaataggctcttgctttttgaatttttataaaaaggggaaaaaagtggcttctagcacgataattgctagaaaaaagggaatctttttcttctctatatgggagactggccaggacaggatcttttttcttggcatatgtttgaaaaaatag

SEQ ID NO: 672 - protein, 94 aa, Desulfotalea psychrophila LSv54
MNVWLLCRNATNVFFCPCNLLKHSFAGICFFLVVESVFLFLNPFKIGSCFLNFYKKGKKVASSTIIARKKGIFFFSIWETGQDRIFFLGICLKK

SEQ ID NO: 673 - DNA, 681 bp, Desulfotalea psychrophila LSv54
atgggaaagcggattataagcgaggccgatattgaaaaggttctccaaggttgtcataaatcaatcctatgtccgccccaggaatgcattgtcactcagcaggcagttgaaatggcgcaggcacagggggttgaaatactttttgaggctccaggacttgtagctcaggagaactgttcttatgtccctgtgcgtggatcttccgcaacggacacccttattgctgaggtgtgtggcattattcaggaatctgtggcgggagccccggcagcagatgccttagagtctcttgttcgtcgtgttgttacggccaagcttgccgaaccagttgttgttcaatctccagtggaaggcgtggttgcctcttgtgctggtgtctctctcattgaggaagatcgtcttgtcagagaaaatgatggtgcttctttggctgttaaagagttgactgcaggtacctctcttgttggcggtcatatgcaatgggaaaagggatcttttacccgtacgctaaaatcacctgaggtggcggtggtggtagcaggtacccttcatcttgaggttgacggtaaaaaaatggtggccgaggcaggtgatatggtttatttccctaaggctgtcgaagtgatttgcagtactcctacctctgtgcgtatagcctgcgttaataagcctgcagagtaa

SEQ ID NO: 674 - protein, 226 aa, Desulfotalea psychrophila LSv54
MGKRIISEADIEKVLQGCHKSILCPPQECIVTQQAVEMAQAQGVEILFEAPGLVAQENCSYVPVRGSSATDTLIAEVCGIIQESVAGAPAADALESLVRRVVTAKLAEPVVVQSPVEGVVASCAGVSLIEEDRLVRENDGASLAVKELTAGTSLVGGHMQWEKGSFTRTLKSPEVAVVVAGTLHLEVDGKKMVAEAGDMVYFPKAVEVICSTPTSVRIACVNKPAE

SEQ ID NO: 675 - DNA, 279 bp, Desulfotalea psychrophila LSv54
atggattcattaggaatgattgaaactaagggcttgatcgcacttattgaagcttcagatgcaatggtaaaggctgctcgtgtacaacttgtaggttacaaacaaattggtgctggtttggtaactgcgattgttcgtggtgatgttgcagcatgtaaagcagcaaccgatgcaggtgcagcagcagccgcacgtattggcgaggtggtagctgtacacgttattccacgtccacatggtgacctggaagaagtatttcccttcaaacgtgacaaatag

SEQ ID NO: 676 - protein, 92 aa, Desulfotalea psychrophila LSv54
MDSLGMIETKGLIALIEASDAMVKAARVQLVGYKQIGAGLVTAIVRGDVAACKAATDAGAAAAARIGEVVAVHVIPRPHGDLEEVFPFKRDK

SEQ ID NO: 677 - DNA, 1344 bp, Desulfotalea psychrophila LSv54
atgatcatgaataaagatagtcttcttcgctcgatactggatgccggtattgtgggcgagggcggagcaggttttcccgcccatgttaaatatgacacgcaggtggatacagttatagccaacggttgtgagtgtgagccactgttgcatactgatcaacatattatgcgtacccgtgcagcggatattgttgttgcgatgcaggccatcgtctccgttacgggagctacccgcggtgttatcggtataaagagtaagtataccgagatagcaaaaatatttgcggactgtatagaaggaacaggcctggagcttgcccaattggataacttttatccagcaggtgatgagcaggctttggtttacgaggtaactggaaagaccattccgcctcttggtctacctaaagatgttggtgcagttgttgccaatgtgggcactttggctgaggtagctgcagccattaagggaacacccttaactcataagattgttaccgtaaccggtgatgttggctctcctgctgttattcgtgtgcctttgggaactaagatgagcgagtgtcttgctcattgtggtggctcaactgtcgccgatcctatatacattcttggtggccctatgatgggtcgcatggtggattccgaagaggactttgccactaagatggtgactaagaccaccggtggactcattgttctgccccgaggtcattatctgcatgtgatggccagtcgtgatatccataccatggaacgtcaggctgccagtacctgtattcagtgtcgcctctgtaccgatctttgtccgcgctatcttataggtcaggattttcaaacccataaggtgatgcgtgcctttgctgcgggtggattgaatggtgctggccttgaacaggcttttctctgttgtgaatgtggcgtctgtgaaatgtttagctgtcccatgggcctttctcctcgtcgtatcaatgctgccattagagcaaaaatgcgtcaggaaaggattccttacgagggctctcgagcagtgattcctgcccaatcagacatgcgcccttatcgtaaggtgccagtgcctcgtttggctttgaagattggtatagatcgttttatggatcttcatcctgccttcaccggtgattatattcctgctgaggtgcgtattccgcttcatcagcatatcggtgcaccatctgtggctcaggtcaaaaaaggtgatgttgtcaaggtgggtcagttgattggtgcagtgcctaagggagccttgggtgcaaaaattcatgcctctattgcaggtactgtaatggaagtaggtaatgaagtagtgattaaaggagcgtag

SEQ ID NO: 678 - protein, 447 aa, Desulfotalea psychrophila LSv54
MIMNKDSLLRSILDAGIVGEGGAGFPAHVKYDTQVDTVIANGCECEPLLHTDQHIMRTRAADIVVAMQAIVSVTGATRGVIGIKSKYTEIAKIFADCIEGTGLELAQLDNFYPAGDEQALVYEVTGKTIPPLGLPKDVGAVVANVGTLAEVAAAIKGTPLTHKIVTVTGDVGSPAVIRVPLGTKMSECLAHCGGSTVADPIYILGGPMMGRMVDSEEDFATKMVTKTTGGLIVLPRGHYLHVMASRDIHTMERQAASTCIQCRLCTDLCPRYLIGQDFQTHKVMRAFAAGGLNGAGLEQAFLCCECGVCEMFSCPMGLSPRRINAAIRAKMRQERIPYEGSRAVIPAQSDMRPYRKVPVPRLALKIGIDRFMDLHPAFTGDYIPAEVRIPLHQHIGAPSVAQVKKGDVVKVGQLIGAVPKGALGAKIHASIAGTVMEVGNEVVIKGA

SEQ ID NO: 679 - DNA, 558 bp, Desulfotalea psychrophila LSv54
atgacagcttatattcagtcagttggaatgatagaatttaccagcattgcagccggtattgaagccgcagatcgtatgatgaaggcctccagtgtagagattttgatgatgaagaccatctgtcctggtaagtttcttgcagcggtacacggtgacgtggctgcggttcaggcttccgtggctgctggtattgacggtgccgatggcgccgtagcggatcatttcgtaattcctagcattgaccaatccgttatttctgcaatgtccggtattgccggtaaaccacagggttgttctcttggtattatagagactttttctgcatcctctgcaattgtggccgcagatcgtgccgcgaagactgccgaggtagatattgccgaagtacgtattgccatgggtcttggtggtaaggctttttgtcttctcaccggtgatgtggctgcagtcagtatggcaacccaggcagcagctgatgcctgtgccgagactgcaatgcttgtccgttctgttgtgattccaagtgttactccagaggttatgagtagtatattgtag

SEQ ID NO: 680 - protein, 185 aa, Desulfotalea psychrophila LSv54
MTAYIQSVGMIEFTSIAAGIEAADRMMKASSVEILMMKTICPGKFLAAVHGDVAAVQASVAAGIDGADGAVADHFVIPSIDQSVISAMSGIAGKPQGCSLGIIETFSASSAIVAADRAAKTAEVDIAEVRIAMGLGGKAFCLLTGDVAAVSMATQAAADACAETAMLVRSVVIPSVTPEVMSSIL

SEQ ID NO: 681 - DNA, 369 bp, Desulfotalea psychrophila LSv54
atgagcatggatggttctataggttttgttgaagttgttggtctggttgccgccattgaagttgctgatgctatggctaaggctgctcgcgtgtctgtgaagaccataaccacggatgcagcaggtggtgtaaccgttatctgtgagggtgatcttgccgcagttggcgcagccgtagatgccggtaaggcagctggctctcgcttgggtgaatgtgtcggtaccaacgttattggccgtccagatgaaagccttgaagctcttttgaccgataaaattggttctgtttttgcagaggaaaaggcagctgccgctattgcggcagctaagcccgcgaaagaattggcttctaaggcagtcaaaaaatag

SEQ ID NO: 682 - protein, 122 aa, Desulfotalea psychrophila LSv54
MSMDGSIGFVEVVGLVAAIEVADAMAKAARVSVKTITTDAAGGVTVICEGDLAAVGAAVDAGKAAGSRLGECVGTNVIGRPDESLEALLTDKIGSVFAEEKAAAAIAAAKPAKELASKAVKK

SEQ ID NO: 683 - DNA, 279 bp, Desulfotalea psychrophila LSv54
atggatgctcttggaatattagaggcaaaaggtattaccggccttatagaggcagcagatgttatgaccaaggcggctcaggtagagttggtgagttacgagcgtattggtggtggttatgtctgtgtgcttattcgtggcgatgtcgctgcctgtaaggctgcaatagatgcgggcgctgcagccgcaaaacgtatgggtaagcttattgccgcccatgttattcctcgtcctcatcaggaccttgaggaaatttttccaattaaattgaataaataa

SEQ ID NO: 684 - protein, 92 aa, Desulfotalea psychrophila LSv54
MDALGILEAKGITGLIEAADVMTKAAQVELVSYERIGGGYVCVLIRGDVAACKAAIDAGAAAAKRMGKLIAAHVIPRPHQDLEEIFPIKLNK

SEQ ID NO: 685 - DNA, 309 bp, Desulfotalea psychrophila LSv54
gtgtggttggggagaaagagtatggaattggcaagagtaagaggtcaggtagttgctaccattcgtgatcctaaggttccccatacaagcttgcttcttgttgacttcattcgcgctgatggtgtggtaagacgcgagggacatgtggctgcagatactctcggtgccggagagggcgagtatgtcctcctggtgcggggaagtggtgccgcgcttgtggtgggcggagggaagccaccgattgacctgagcgttgttgccattgttgaccagatcagtgctctgaatgaagtgatttatagtaaataa

SEQ ID NO: 686 - protein, 102 aa, Desulfotalea psychrophila LSv54
MWLGRKSMELARVRGQVVATIRDPKVPHTSLLLVDFIRADGVVRREGHVAADTLGAGEGEYVLLVRGSGAALVVGGGKPPIDLSVVAIVDQISALNEVIYSK

SEQ ID NO: 687 - DNA, 1428 bp, Desulfotalea psychrophila LSv54
atgtctattggccgcgaacaaattgagtctattgtcgcagaggttatttctcaaataggtaatgttcagcagggtgctcctgttttgtctggctcggcagcaggtgattggggtgtctttgatgagttggatgatgccgttgcggcagctaaggcggcttgcaagcttattgatactgttgctatgcgtacccgtgtcgttgaggtaatgcgtcgtgccgcccggatgaatgcacgtccccttgctgagaaggctgttgcagaaacgggcatgggcaatatagaagataaggtgttgaaaacactgcttgtggccaacagcactccgggtcctgagattcttcagcccacggcaattaccggtgatgatggctttacccttatagagaatgctccttggggtgttattgcctcggttactccctctaccaatcctggatcaactgttattaataacggtatcagtatgatctcaggtggtaatgcagttgtctttgctccgcatcctgccgcaaagcgcatcactcaagaggctattaagctcatgaataaggctattgcagaggagactggtattaataacctgctcgtttgcattaaagagccatctcttgatgcggcccaacgtctctttacctatccgggaattaatcttctcaccgtaaccggtggtgaagccgttgttaaggctgctcgtaaggtcaccgataagcgtcttattgccgcaggtgctggtaatcctcccgttgtggttgatgagacagcggatcttgcccgtgctgctgaaagtatttatatcggtgcctcctttgataacaacctcatctgcgccaacgagaaagagattattgttgttgagtctgtagcggatcagtttaagcgtgagtttgtcgccgctggtgcctttgaaatttctcttgagcaggcagaggccattggtaagaccgttcttcttgattacggtaccgataagtgtcgtgctaatcctaaatgggttggccgtgatgcctataagcttgcagagcttatcggagtaaccattcctgctggttgtaaacttctctttgttgacgtaaaaggtgacgcccgtcatccttttgctgtaaccgagcagatgatgccgcttattcctgttgttcgtgcccgtaactttgatcaagctcttgagtgggctcttatgcttgaacgcggtttgagtcataccgctggtctgcactccaccaatattcacaatatggagagaatggccaaggccgttaataccagtctctttgtgaaaaatggtccccatattgccggacttggtgcaggcggtgaaggttggacttccatgactatctccactccaaccggtgaaggtgttactaacgcagcgacctttgttcgtcttcgtcgctgtgcccttgtcggcagctttaggattgtctag

SEQ ID NO: 688 - protein, 475 aa, Desulfotalea psychrophila LSv54
MSIGREQIESIVAEVISQIGNVQQGAPVLSGSAAGDWGVFDELDDAVAAAKAACKLIDTVAMRTRVVEVMRRAARMNARPLAEKAVAETGMGNIEDKVLKTLLVANSTPGPEILQPTAITGDDGFTLIENAPWGVIASVTPSTNPGSTVINNGISMISGGNAVVFAPHPAAKRITQEAIKLMNKAIAEETGINNLLVCIKEPSLDAAQRLFTYPGINLLTVTGGEAVVKAARKVTDKRLIAAGAGNPPVVVDETADLARAAESIYIGASFDNNLICANEKEIIVVESVADQFKREFVAAGAFEISLEQAEAIGKTVLLDYGTDKCRANPKWVGRDAYKLAELIGVTIPAGCKLLFVDVKGDARHPFAVTEQMMPLIPVVRARNFDQALEWALMLERGLSHTAGLHSTNIHNMERMAKAVNTSLFVKNGPHIAGLGAGGEGWTSMTISTPTGEGVTNAATFVRLRRCALVGSFRIV

SEQ ID NO: 689 - DNA, 867 bp, Desulfotalea psychrophila LSv54
ttgttcgtcttcgtcgctgtgcccttgtcggcagctttaggattgtctagtatggctatttcatgggaactcgcctgcgaaaggctcgaccgtgctgcggcaatgattaatgataccgaagcagttgaagtagaggggccaattcacgttggtattgatttaggtacagccgatgttgtcttgatggccattgatgccgagggcgaacctgttgccgttttcctggaatgggcagaggtggtacgtgatggcgtggttgtcgattatgtcggcgctattgatattgtccgtcgctttatcaagcaggccgaagagcgtcttggctgtgaaatcacccaagcctcgacatcttttcctccgggaacagatgcgcgcctctcgataaatatcttggaatctgtggggcttgaggtcacctatgtagaggatgagccaagctgtgttgctcatcttcttgatctgaataaggccgccattgttgatattggtggtggtaccaccggtactgctgtggtgaggaatagtcaggtggtttttagtgatgacgagcctacgggcggtaagcatctttctctgaccattgccggttactatgatatctctatagaagaggcagagcagcgtaaacgcaaggccgctgaatttaatattctcagtattgtccgtccaaccttggaacgggtgactgatattgtggcagatcatataaggggtcaggaggtggagactattttgctctctggcggtacctgttgtttgcccggggttgtaggggtctttgagaaggagttgaagttgcctattcagctaccgacccagcctcttatgcttactccattttccatagcgtcgctgaatttacgttag

SEQ ID NO: 690 - protein, 288 aa, Desulfotalea psychrophila LSv54
MFVFVAVPLSAALGLSSMAISWELACERLDRAAAMINDTEAVEVEGPIHVGIDLGTADVVLMAIDAEGEPVAVFLEWAEVVRDGVVVDYVGAIDIVRRFIKQAEERLGCEITQASTSFPPGTDARLSINILESVGLEVTYVEDEPSCVAHLLDLNKAAIVDIGGGTTGTAVVRNSQVVFSDDEPTGGKHLSLTIAGYYDISIEEAEQRKRKAAEFNILSIVRPTLERVTDIVADHIRGQEVETILLSGGTCCLPGVVGVFEKELKLPIQLPTQPLMLTPFSIASLNLR

SEQ ID NO: 691 - DNA, 225 bp, Desulfotalea psychrophila LSv54
atgaaaaaactctatcctcttctagcaaaattcgtgcaaaaaaaacacatgttctctttttttttgttgttagcgaaaaaaaatcctatttccatagggaaaaccaagccatccttaaaaaaaatatcaggcaaatccttttttttcaggaaaagagagagacaaaggccaagaaacaatggccaaaagttgcattttcgcacaaaaagacaagtagtctcctga

SEQ ID NO: 692 - protein, 74 aa, Desulfotalea psychrophila LSv54
MKKLYPLLAKFVQKKHMFSFFLLLAKKNPISIGKTKPSLKKISGKSFFFRKRERQRPRNNGQKLHFRTKRQVVS

SEQ ID NO: 693 - DNA, 825 bp, Desulfotalea psychrophila LSv54
atgggaaagcggattataaccgaagccgatattaatggggccctcaagagtgggaagaagtcgatcctatgcccgcctcaagagtgtattattacccctcaagcagttgataaggccttggagttaggtttgaaaatactccaggttgaagagaagaaggttgtggttgaggcctgtcctcttaccagtactcctgctccggctgccccagttgctccggcggccccagctgttccagtaaaacctgctgctcctgtagcgccagtggcttttgctgctcctgccatagttactccaactgctccagtgaacacctcaggcgaggccgatgtcctgatttctgaagtctgtgaaatcctgaaaaagcgccttccgggtgtgttgaccgatgaggctcttgagagtcttgtgcgtagggtagtaacggaaagacttgctcagcctgatgtttctgtctctctggtagcagagaatgcctcttcttcctgtggtggtatctgtgtggttgagggcgatcgccttcttaaggcaaatgccggtgctcctgtagctgtagcagaacaggtgtttattgccgatgccctgggcgaatgtgctggcgctcaacttgccggtggttatatggagtgggagaaggcatctttcaagcgtaccgtggaatgtccagaggtaggtgttgttgttgcaggtgagttacatcttgatatttgtggaaaaaccttggtggctaaggttggcgatatggtttatttccccgaaggtgtagatgtaacctatagtactcccacttctgtacgtattgcgtgcatcaacaacgttgcttag

SEQ ID NO: 694 - protein, 274 aa, Desulfotalea psychrophila LSv54
MGKRIITEADINGALKSGKKSILCPPQECIITPQAVDKALELGLKILQVEEKKVVVEACPLTSTPAPAAPVAPAAPAVPVKPAAPVAPVAFAAPAIVTPTAPVNTSGEADVLISEVCEILKKRLPGVLTDEALESLVRRVVTERLAQPDVSVSLVAENASSSCGGICVVEGDRLLKANAGAPVAVAEQVFIADALGECAGAQLAGGYMEWEKASFKRTVECPEVGVVVAGELHLDICGKTLVAKVGDMVYFPEGVDVTYSTPTSVRIACINNVA

SEQ ID NO: 695 - DNA, 981 bp, Desulfotalea psychrophila LSv54
gtgagcatattagaacgttgtaaagatgtatgtcgtaaagcgcctaagacaattgtctttcctgattgcctcgataagagagtttttgaggcggctggtcgtcttcaggcagaagggcttgctcatccagtatttatgggttctccgtttgctgttcgcgctaagatgcgggaggcaaaatgttcaagtcgtggggtgaccgtggttgaccataccagtccctctctgcttgaaaaaaatgccaatgaatttattgcaattcgtgaggcaaagggtaaaaagctgagcatggatgatgccgtaaaggccatgagatgtccccttgccggtgcagctatgatggtgcgtcgtgaggaggttaatctgggtgtttccggtaatatatcttcgactggtaatgttattcgtgcaggtttgcagtttctgcccaagcagcagggtatgaaaaccatctccagcttcttttttatgatagcaccggaaggcggaaaagattatatctttgccgattgtggtgtagtgccagtgcccaatgaaaatactttggctgatatagccatatcatcggcggataaggcgcgcaagttactcggtgaagaacctcgggtggccatgctctctttttctactaagggtagcgccaatcatgagcgggcaatttttgttcgtgataccgttgagcaaattcgtaagcgcgctcctgatatgttggttgacggtgagctacaactcgatgcagctatcgtcccaagtgttgctgcccaaaaggctcccggtagtgtagttgaaggaatggcaaatgtgcttatctttccttctcttgaagcaggtaatattggctataagctcgctcagcgtttgggtgggtatacagctcttggcccgcttcttcagggttttgctgcaggttggcatgatctttcccgtggttgtactgcggatgatatatataaggttgccgttgtaggtcagtgcctataa

SEQ ID NO: 696 - protein, 326 aa, Desulfotalea psychrophila LSv54
MSILERCKDVCRKAPKTIVFPDCLDKRVFEAAGRLQAEGLAHPVFMGSPFAVRAKMREAKCSSRGVTVVDHTSPSLLEKNANEFIAIREAKGKKLSMDDAVKAMRCPLAGAAMMVRREEVNLGVSGNISSTGNVIRAGLQFLPKQQGMKTISSFFFMIAPEGGKDYIFADCGVVPVPNENTLADIAISSADKARKLLGEEPRVAMLSFSTKGSANHERAIFVRDTVEQIRKRAPDMLVDGELQLDAAIVPSVAAQKAPGSVVEGMANVLIFPSLEAGNIGYKLAQRLGGYTALGPLLQGFAAGWHDLSRGCTADDIYKVAVVGQCL

SEQ ID NO: 697 - DNA, 279 bp, Desulfotalea psychrophila LSv54
atggattcattaggaatgattgaaactaaaggcttgaccgcactcatcgaagcttcagatgcaatggtaaaagctgctcgcgtacaactggtaggttacaagcaaattggtgctggtctcgtaactgcgattgttcgtggtgatgtggcagcatgtaaggccgctaccgatgcaggtgcagcagcagcagcacgtattggcgaggtagtagctgtgcacgttattccacgtccacatggtgatttggaagaagtcttccctttcaaacgtgacaagtaa

SEQ ID NO: 698 - protein, 92 aa, Desulfotalea psychrophila LSv54
MDSLGMIETKGLTALIEASDAMVKAARVQLVGYKQIGAGLVTAIVRGDVAACKAATDAGAAAAARIGEVVAVHVIPRPHGDLEEVFPFKRDK

SEQ ID NO: 699 - DNA, 1344 bp, Desulfotalea psychrophila LSv54
atgatcatgaataaagatagtcttcttcgctcgatactggatgccggtattgtgggcgagggcggagcaggttttcccgcccatgtaaaatatgatacgcaggtggatacagttatagccaacggttgtgagtgtgagccactgttgcatactgatcaacatattatgcgaacccgcgcagcggatatcgttgtcgcgatgcaggccatcgtctccgttacgggagctacacgcggtgttatcggtataaaacgtaaatataccgaaatagcaaaaatatttgctgactgtatagaggggacaggtttagagcttgttcagttggataacttttatccagcaggtgatgagcagaccctagtctacgaggtaaccggaaaaaccattccgcctcttggtttgcctaaggatgttggcgctgttgttgccaatgtgggtactcttgccggagtagccgacgccatgaaaggtacgccagttactcataaaattgttactgtaaccggtaatgtaggtagccctgctgttattcgtgtgcctcttggcaccaagttgagtgagtgtcttgctcactgcggcggcgcaaccattgctgatcctgtttacattcttggtgggccaatgatgggtcgcatggtcgactcagcagaggaatttgccgccaaggtagtcactaagaccaccggtggtcttattattttgccacggggtcattatctacataccatggccagccgtgatctgcagagcatgcagcgccaggctgccactgcctgtattcagtgtcgcctttgtaccgagctctgtccccgttatcttataggtcaggattttcagacccataaggtgatgcgtgcctttggtggtggtggagatgtcgcccttggtgccatgcaggcagctctctgttgtgagtgtggtgtttgtgagttgtttagttgtcccatgggcctttctcctcgtcgtattaacgcagctctaaaggctcgttttcgcgaaaacaaggtgccctatgagggatctcgtgaggttattcccgcccagtctaaggttcgtccttaccgtaaggtgcctgtgcctcgtttggccctgaagattggtattgataagttcatgaatattcatcctgattttaccggtgactatactcctgctgaggtgcgtattccacttaatcagcatatcggtgcaccagcagtggcccaggttaaggcaggtgattttgttcaggtgggtcagttggttggtgcagtgcctcaaggtgccttaggtgctacagttcacgcctctatcgcaggcactgtggtagaagtaggtaatgaaatagtgattaaaggagtgtag

SEQ ID NO: 700 - protein, 447 aa, Desulfotalea psychrophila LSv54
MIMNKDSLLRSILDAGIVGEGGAGFPAHVKYDTQVDTVIANGCECEPLLHTDQHIMRTRAADIVVAMQAIVSVTGATRGVIGIKRKYTEIAKIFADCIEGTGLELVQLDNFYPAGDEQTLVYEVTGKTIPPLGLPKDVGAVVANVGTLAGVADAMKGTPVTHKIVTVTGNVGSPAVIRVPLGTKLSECLAHCGGATIADPVYILGGPMMGRMVDSAEEFAAKVVTKTTGGLIILPRGHYLHTMASRDLQSMQRQAATACIQCRLCTELCPRYLIGQDFQTHKVMRAFGGGGDVALGAMQAALCCECGVCELFSCPMGLSPRRINAALKARFRENKVPYEGSREVIPAQSKVRPYRKVPVPRLALKIGIDKFMNIHPDFTGDYTPAEVRIPLNQHIGAPAVAQVKAGDFVQVGQLVGAVPQGALGATVHASIAGTVVEVGNEIVIKGV

SEQ ID NO: 701 - DNA, 558 bp, Desulfotalea psychrophila LSv54
atgacaacttatatacaatcagttggaatgattgaatttagtagtattgcagctggtattgaggctgcagataggatgatgaaggcctctagcgtagagatcttgatgatgaagaccatctgtccaggtaagtttattgcagctgtgcacggtgacgtggcagcggttcaagctgccgtggctgcaggtattgacggtgccgatggtgccgtggcggatcattttgttatcccgagtattgatcgatccgttattgctgccatgtctggcattgcaggaaaaccacaggggccttccctgggtataatagagactttttccgcatcttcagcgattgtagcggcagatcgggcagcaaagaccgccgaggtagatattgccgaggtacgtattgccatgggtcttggtggtaaggctttttgtcttctcaccggtgatgtagcagcagtaagtatggcaacccaggcagcagctgatgcctgtgccgagactgcaatgcttgttcgttctgttgtgattccaagcgttacgcctgaagttatgcgtagtatattatag

SEQ ID NO: 702 - protein, 185 aa, Desulfotalea psychrophila LSv54
MTTYIQSVGMIEFSSIAAGIEAADRMMKASSVEILMMKTICPGKFIAAVHGDVAAVQAAVAAGIDGADGAVADHFVIPSIDRSVIAAMSGIAGKPQGPSLGIIETFSASSAIVAADRAAKTAEVDIAEVRIAMGLGGKAFCLLTGDVAAVSMATQAAADACAETAMLVRSVVIPSVTPEVMRSIL

SEQ ID NO: 703 - DNA, 366 bp, Desulfotalea psychrophila LSv54
atgaatggttctataggttttgtagaagtaattggtttggttgccgccattgaagtagcggatgctatgactaaggctgcccgtgtgtctgtgaagaccataaccacggatgcagcaggtggtgtaactgttatctgtgagggtgatcttggcgcagttggagcagctgtagatgcaggtaaggcagctggatctcgtttgggtgaatgtgttgcaaccaacgttattcctcgtccggatgatagtcttgaggttctggtgaatgacaagataggttctatctttgcagaagaaaaggcggcagcagcagcggctaaggtagcagctaatgcgaaacgtcctgcgaccaaagcaactaaaaaatag

SEQ ID NO: 704 - protein, 121 aa, Desulfotalea psychrophila LSv54
MNGSIGFVEVIGLVAAIEVADAMTKAARVSVKTITTDAAGGVTVICEGDLGAVGAAVDAGKAAGSRLGECVATNVIPRPDDSLEVLVNDKIGSIFAEEKAAAAAAKVAANAKRPATKATKK

SEQ ID NO: 705 - protein, 279 aa, Desulfotalea psychrophila LSv54
ATGGATGCTCTTGGTATATTAGAAGCAAAAGGTATAACCGGTCTTGTAGATGCAGCAGACGTAATGACTAAGGCGGCTCAGGTAGAGTTGGTGAGTTATGAGCGTATTGGTGGCGGTTATGTCTGTGTGCTTATTCGTGGTGATGTTGCCGCGTGTAAAGCCGCAATTGATGCCGGTGCCGCAGCAGCAAAACGTATGGGCAAGCTTATTGCGGCCCATGTTATTCCTCGTCCCCATCAGGATCTTGAGGAAGTGTATCCAATTAGATTGAAAAAATAA

SEQ ID NO: 706 - protein, 92 aa, Desulfotalea psychrophila LSv54
MDALGILEAKGITGLVDAADVMTKAAQVELVSYERIGGGYVCVLIRGDVAACKAAIDAGAAAAKRMGKLIAAHVIPRPHQDLEEVYPIRLKK

SEQ ID NO: 707 - protein, 291 aa, Desulfotalea psychrophila LSv54
ATGGAGTTAGGAAGAGTGAAAGGTCAGGTCGTTGCAACTATTCGTGACCCTAGAGTCCCTCATGCAAGTTTGCTTCTTGTGGATCTTATTAATGCTGAAGGCGATATAATACGTTACGGTCAAGTGACGGTGGATACCCTTGGGGCTGGAGAGGGCGAGTATGTTCTTTTGGTTCGCGGGGGTGGCGCTGCGCCCCGTACAGCGACAGGAGAGAGATCTCCTGTTGATCTGAATGTTATTGCAATTGTTGATCAGATCACTGCTTCAGGTGGGAAACTTTACGCCAAATAA

SEQ ID NO: 708 - protein, 96 aa, Desulfotalea psychrophila LSv54
MELGRVKGQVVATIRDPRVPHASLLLVDLINAEGDIIRYGQVTVDTLGAGEGEYVLLVRGGGAAPRTATGERSPVDLNVIAIVDQITASGGKLYAK

SEQ ID NO: 709 - DNA, 1440 bp, Desulfotalea psychrophila LSv54
gtggagttagagatgtctataggacaagcacaaattgagtctattgtatcagaagtacttgctcaattgagcaaagcgcaaaatggtagccttgtagcctctgccccggcagcaggcgattggggtgtttttgatgagcttgatgatgccgtagcggcagccaaagtggcttacaagcttattgataccgttgctatgcgtaaccgtgtagtagatgttatgcgtcgcgctgctcgcatgaatgcacgtcgtctctctgagatggctgtatctgagactggtatgggtaatgttgaagataaggttgctaagaccttgcttgtggctaaccgtactccaggaccagagattcttcagcctacagcaattaccggtgacgagggctttacccttatcgagaatgctccttggggtgttattgcctctgttactccttctactaacccaggatctaccgttatcaataatggtatcagcatgatctctggtggtaacagtgttgtttttgctcctcatcctgcagcaaaacgtattactcaagaaaccatcaagatgatgaacaaggctattgtagaagagacaggtgttcataaccttctcgtctgtatcaaagagccttctcttgatgcggcccgacgtctctttacctacgagggaattaatcttcttaccgtaaccggtggcgaggctgttgtagctgctgctcgtaagattaccgataagcgccttatcgcagctggtgcaggtaatcctcctgtagtagttgatgagaccgctgatcttgctcgtgctgctgagagcatttatattggtgcctcttttgataacaacctgatctgtgccaatgaaaaagagatcattattgttgattctgtagcggatgagttcaaacgtgagtttactgctatcggcgcatttgagatctctcttgcccaggcagagaccatcggtaaaaccgttcttcttgactacggtaccgataagtgtcgtgctaatcctaagtgggttggtcgtgatgcttataagcttgcagatcttgctggaatcaccattcctaagggatgtaaacttctcttcgttgatgtgaaaggcgatgctcgtcatcctttcgctgtaaccgagcagatgatgccacttattcccgttgttcgtgcccgtaactttgaccaagctcttgagtgggctcttatgcttgagcgtggtttgagtcacactgctggtatgcactctaccaatattcataacatggagaaaatggctaaggctgtgaataccagtctctttgttaagaacggaccgcatattgccggacttggtgcaggtggtgagggttggacttccatgaccatctctactccaaccggtgaaggtgtaagtaacgcggcaacatttgttcgtcttcgtcgttgtgcccttgtaggtagctttagaattgtatag

SEQ ID NO: 710 - protein, 479 aa, Desulfotalea psychrophila LSv54
MELEMSIGQAQIESIVSEVLAQLSKAQNGSLVASAPAAGDWGVFDELDDAVAAAKVAYKLIDTVAMRNRVVDVMRRAARMNARRLSEMAVSETGMGNVEDKVAKTLLVANRTPGPEILQPTAITGDEGFTLIENAPWGVIASVTPSTNPGSTVINNGISMISGGNSVVFAPHPAAKRITQETIKMMNKAIVEETGVHNLLVCIKEPSLDAARRLFTYEGINLLTVTGGEAVVAAARKITDKRLIAAGAGNPPVVVDETADLARAAESIYIGASFDNNLICANEKEIIIVDSVADEFKREFTAIGAFEISLAQAETIGKTVLLDYGTDKCRANPKWVGRDAYKLADLAGITIPKGCKLLFVDVKGDARHPFAVTEQMMPLIPVVRARNFDQALEWALMLERGLSHTAGMHSTNIHNMEKMAKAVNTSLFVKNGPHIAGLGAGGEGWTSMTISTPTGEGVSNAATFVRLRRCALVGSFRIV

SEQ ID NO: 711 - DNA, 2486 bp, Desulfotalea psychrophila LSv54
atgtctgtagaatgttgtcgctctccacatgagcaaatgatcatggacaaggccgcaggaaaagtaaacaagttccgtgcaacccacgagcgtgttttcaaaatccttgataaaattgaaactgctaagccacaaattgatatagagcgtgctctttatttcacccaaggtatgcaagagacagaaggtcagcatcttaaccttcgttgggcaaaatctcttatgaagtgtgcagagaacatgactgtatacatcgatgacgatcagcttcttgccggtcgtatcggataccagggacgttatggtgttctctacccagagcttgatggtgactttcttgatactgcggtagttgatcttcctacccgtgacaactctcctttctccatctctcaagcagatgcagatatcgttgttaaagagattgctccttactggaaaggtaagacttatcacgagactcttgctaaaacccttccagcagacgtacacgcacttacctatgatgatccagatggaatggtttcacgtttcatcgtaaacgagaccgcttcttttcgttcttctaatcagtgggtacatgacttcgataaagtattgaagcgtggtttcggtggacttcgtgacgagtttacagttcagcttgaagctcttgaccctctctctcctggtgacaacgtagacaagaagcctttccttcaggcagctattctcgtatgtgaagctgttattgtttgggctaagcgtcacgctgcacttgccatggaacttgcagagaaatgtgctgatcctgttcgtaaggcagaacttctcaagatggctgaggtatgtaaccacgtacctgagcatccagctcgtaccttctacgaagcatgtcaatctcagtggttcactcagatgttctctcgtcttgagcagaaaactggtaccattatctccaacggtcgtatggatcagtacctctatccattctacaagcaagatattgaagctggtattctcaccgatgaccaggctattgagtacgttgagcttatgtatgtaggtatggctcagtatatcgatctctatatctcccctaccggtggtgctttcaacgaaggctatgctcattgggaagcagtaaccatcggtggtcagaccccagatggtcttgatgcaaccaacgagttgacttatctcttccttcgttctaagcgtgagttccctcatcactaccctgatcttgctgctcgtattcacgctcgtgctcctgagcgtttccttgcagaagttgcagagaccattaaagaaggttctggtttccctaaactgatcaatgatgaggaagtaattccacttcaccttgcaaaaggtgctaagttcgaagagatttacgactattcagtatctggttgtgctgagattcgtatgccaaaccgtgatacctacacagctggtggttgttacatcaactttgtagctgcccttgagtctgtattcttcaacggtaaaatgcttaagttcggtgatgctcaactttccatcgagactggtgatgtaaccaagatggagacctgggaagagttctggaatgcttacaaagctcagcacatcaacttccttaagattgctttcgaacagcagtactatgtaatcaagacccgtgctcgtcattttgctgcacctatgggttctgcgcttcatgatcttgccatgaagcattgcattgatattcaccaaccatatattcctgagggaattgaccttggttactttgagttcatgggtgttggtactcttgttgactcaatgagcgcaatcaagaagttcgtattcgaagagaagaaagtcaccatgactgaagttcttgaagctatgaagaacaacttcgaaggccaggaagatctccgtgcccttatgatgactgctccatgtttcggtaataacgatccatatgcagattcaattgctcgtgatcttgatcagctctgtgtaggttatgctgagaagtatcagcgtgagcttggcgtattccttgatcttcgttatgtaccattcacctccccgtaccttttggtaaagtggtatgtgcaactcctaacggacgttatgcaggaacctctctttccgatggttcttctgcttctcacggtgctgataagaacggacctactgcggttcttctctctaactacacctctaaaaacttcaaccaccgtgagcgtgcagctcgtcttgtgaacatcaagttcacacctaagtgtgttcaaggtgaggaaggaactcagaagttggtacatttcattcgtaccttctgtgatcttcgtttgtggcacattcagttcaacgttgttaacgctgagaccttgagacttgctcaagagaatccagaagcatatcgtaccctgatcgttcgtattgcaggatattctgcttacttctgtgatctctctaaagatcttcagaacgatctgatcagacgtaccgctcacgaaaatatgtag

SEQ ID NO: 712 - protein, 828 aa, Desulfotalea psychrophila LSv54
MSVECCRSPHEQMIMDKAAGKVNKFRATHERVFKILDKIETAKPQIDIERALYFTQGMQETEGQHLNLRWAKSLMKCAENMTVYIDDDQLLAGRIGYQGRYGVLYPELDGDFLDTAVVDLPTRDNSPFSISQADADIVVKEIAPYWKGKTYHETLAKTLPADVHALTYDDPDGMVSRFIVNETASFRSSNQWVHDFDKVLKRGFGGLRDEFTVQLEALDPLSPGDNVDKKPFLQAAILVCEAVIVWAKRHAALAMELAEKCADPVRKAELLKMAEVCNHVPEHPARTFYEACQSQWFTQMFSRLEQKTGTIISNGRMDQYLYPFYKQDIEAGILTDDQAIEYVELMYVGMAQYIDLYISPTGGAFNEGYAHWEAVTIGGQTPDGLDATNELTYLFLRSKREFPHHYPDLAARIHARAPERFLAEVAETIKEGSGFPKLINDEEVIPLHLAKGAKFEEIYDYSVSGCAEIRMPNRDTYTAGGCYINFVAALESVFFNGKMLKFGDAQLSIETGDVTKMETWEEFWNAYKAQHINFLKIAFEQQYYVIKTRARHFAAPMGSALHDLAMKHCIDIHQPYIPEGIDLGYFEFMGVGTLVDSMSAIKKFVFEEKKVTMTEVLEAMKNNFEGQEDLRALMMTAPCFGNNDPYADSIARDLDQLCVGYAEKYQRELGVFLDLRYVPFTSHVPFGKVVCATPNGRYAGTSLSDGSSASHGADKNGPTAVLLSNYTSKNFNHRERAARLVNIKFTPKCVQGEEGTQKLVHFIRTFCDLRLWHIQFNVVNAETLRLAQENPEAYRTLIVRIAGYSAYFCDLSKDLQNDLIRRTAHENM

SEQ ID NO: 713 - DNA, 1023 bp, Desulfotalea psychrophila LSv54
gtgctatggtatggagatggtccccggatcatctccatatttgcttgtagtatattaatttatataaggggccgggtaagcatcatgagttcacttttagataataaaataaagggcgttgtttttaacgttcaaaaatattccgttcacgatggcccgggcatccgcactgttgcatttttaaagggatgtccattgcattgtaagtggtgctgtaatcctgaatcgcaaaaacataagccagagttggcctataaccccagtaaatgtttaggacttgataaatgtgttcgttgtactgaggtatgtaccgacggtgcaattgccgagggagcagacggtaaggttgtattgcgtcgtgaatttgttagcaatgagcaagcttacgccgatgcctgtccttctggtgccctgaacatgtacggtgaagagatgactgttaagaaagtagttgatcgtgttgaagaagacgctatcttctatgctcgttcaggcggtggcatgacactctctggaggagaaccttttgctcaagcagagtttgcccttgccctgttgcgagaagctcgtcacagacgtataaagactgccgttgagacctgtggcgctgctaaatgggaaaatattgaggcctgtgttccctatctcaataccattatgtttgatgtaaagagtcttaacgaagagaagcataaagagtttactggtgtgtccaataagctcccgttggaaaatttacgaaaaattcgtgaaatggcgccaagcgttcctattcgtgctcgaactccaattattccaggctttaatgatactgaagaagatattaaggcaattgttgaatttttggaaagccttcccggagatcctgtagagtacgaggtacttgagtatcatcgtatgggccagccaaagtatggttatattggtcgtgattacgagttggtagatgcgacgcttgagcctgctctttttgataagctgaagctgattgccgatgcttacaaggaaagaaattttaaatag

SEQ ID NO: 714 - protein, 340 aa, Desulfotalea psychrophila LSv54
MLWYGDGPRIISIFACSILIYIRGRVSIMSSLLDNKIKGVVFNVQKYSVHDGPGIRTVAFLKGCPLHCKWCCNPESQKHKPELAYNPSKCLGLDKCVRCTEVCTDGAIAEGADGKVVLRREFVSNEQAYADACPSGALNMYGEEMTVKKVVDRVEEDAIFYARSGGGMTLSGGEPFAQAEFALALLREARHRRIKTAVETCGAAKWENIEACVPYLNTIMFDVKSLNEEKHKEFTGVSNKLPLENLRKIREMAPSVPIRARTPIIPGFNDTEEDIKAIVEFLESLPGDPVEYEVLEYHRMGQPKYGYIGRDYELVDATLEPALFDKLKLIADAYKERNFK

SEQ ID NO: 715 - DNA, 870 bp, Desulfovibrio desulfuricans G20
gtgaagcagcagacgaaatattccatcggcgatgtcagccagatctgcaacatctcaaaaaaggcgttgcgctattatgacaagatcggccttatcacctcgcagcgtcaggactacaacaactatcgctactatacgcacgaatcgcttctggctgtacctgtaatcaaatattacaaacagatgggcttcaagctcgacgaaatgcgcgaatttatcgaaggcagcacagccaacgtttaccgcgccatccgcaattcttttctttccaaaattcaggagctggaaaaagagcaggaagagatcagacgcaagcacatgtctgtaaaagactggtatgacctgattctggaagcggagatggtcattgacaacaacattcaggaagtttccatcaagtatattgagccgtcgcggtatctgtttctgaaccagacatatgacaccaacatcaaggcggccatcatcaacatagacttcaccaactatgtggaaagcctgaataacgaaataacagggccggtcattctcaacttttcctcacatgcagcccgcatgaaggacaaagaacagcccgtcaggatactgcagaaaaccctgatgccctgccacgatgaatacaccaccgatatgggcgggcacatgatggcggcctgctaccacatcggcccgcacgaagacattgccgagacatacaaaaagatacgccgctgggcccgtcagcacggatacacgctgggcgatgaatcgtacgaacgctatgtgacagactactggacaaccagaaattccgccaaattcgtcaccgaaataatgatcaaggcatcacggcagacagtcgtcgtgccggaacaggaagacgagctctga

SEQ ID NO: 716 - protein, 289 aa, Desulfovibrio desulfuricans G20
MKQQTKYSIGDVSQICNISKKALRYYDKIGLITSQRQDYNNYRYYTHESLLAVPVIKYYKQMGFKLDEMREFIEGSTANVYRAIRNSFLSKIQELEKEQEEIRRKHMSVKDWYDLILEAEMVIDNNIQEVSIKYIEPSRYLFLNQTYDTNIKAAIINIDFTNYVESLNNEITGPVILNFSSHAARMKDKEQPVRILQKTLMPCHDEYTTDMGGHMMAACYHIGPHEDIAETYKKIRRWARQHGYTLGDESYERYVTDYWTTRNSAKFVTEIMIKASRQTVVVPEQEDEL

SEQ ID NO: 717 - DNA, 249 bp, Desulfovibrio desulfuricans G20
ttgtcgcatgaaattgcaccgcactgcaattccggcagacggcaagttataatggtatcactcaccgttgtgcgcaacgtatccgttcagttggcaaaccataatcaggacggcttccgcatcagtatgctctcgtctattccccgtggtcagcagaagccatctgcgggcggcatgtttgcgcccattctagcacatgcgccgtcatgtaaaaaagggggccgccccgtgcgggacagccccttatga

SEQ ID NO: 718 - protein, 82 aa, Desulfovibrio desulfuricans G20
MSHEIAPHCNSGRRQVIMVSLTVVRNVSVQLANHNQDGFRISMLSSIPRGQQKPSAGGMFAPILAHAPSCKKGGRPVRDSPL

SEQ ID NO: 719 - DNA, 267 bp, Desulfovibrio desulfuricans G20
atgaaaccgctcaactacgctattctgaagcacgtcaccaaggtgcaggaagccagcgcctgcgaaattatggaagccctgaaagaccagtacggacacttcaaggcatttaagaaagattccattctcagcgcgctgatgacggcagaagccaacggtcttctggaagaatcccgctttgatatggacgaaagcaatgagctgcgtgtgtacttccgcgctcacgaagaaggtgcagccaccatcaaccgctacatcaaggattga

SEQ ID NO: 720 - protein, 88 aa, Desulfovibrio desulfuricans G20
MKPLNYAILKHVTKVQEASACEIMEALKDQYGHFKAFKKDSILSALMTAEANGLLEESRFDMDESNELRVYFRAHEEGAATINRYIKD

SEQ ID NO: 721 - DNA, 1080 bp, Desulfovibrio desulfuricans G20
atggggcaaactgcagtaatgaataacccggcagcgctggttgccaaaaacaagctggctgcggacttccggcgcaagggcatcatgatcgccctgctttccggtctgctttacggcttttacaccgcgttcatgacgctgggcatgtccaagggcgtctgggtggaatggtacggcgaaaattccggcctctccgcctttgccgtcatgtatctgctgtctgcactgggcgcggccaccaccgacagctccagcgctctgtgggccatgggcattgccggtatccgcggccgtttcggcgactttgtgcgctgcatcaaaacaagacccggcttcgtgatggttgtcgccgccattatcggcggcccgctggccagcaccgcctacgttgtgggtctgcagcaggccggttccatcgtggtgcccatcagcgcgctgtgccctgccatcggcgccattctgggccgcttcctgttcaagcaggaacttaacgcccgcatgctgctgggtatcgccatctgcttcggcgccagcgccatgatcggcagcaccggcatgggcaccgaagctccgcccagcctgcttaccggtatacttttcggcttcattgcagccctgtgctggggtatcgaaggctgcgtatgcggttacggcacttccatgatcgaccctgaaatcggcatcaccatccgtcaggtcacttccggagtttcgaacctcatcattcttgttcccctcttcagcatgatttccgacgtcaatcctgtgaccatggttgccaccgccttcggcgacggcgaagccatggtgtggtttgcactggccggactgagcgcctacctgaccttcatgttctggtacaagggcaacgccatgtgcggtgccgcactgggcatggcctgcaacggcacattctccttctggggccccttctgctgctggattgtgctgggcgtggctttcggctacgacggctggtccatgcctcccatcgcctgggctgctgcagttgtcatggtcttcggcatcttccttatttcgatgaaccccatggacctgctgaaaaaaaggaacggataa

SEQ ID NO: 722 - protein, 359 aa, Desulfovibrio desulfuricans G20
MGQTAVMNNPAALVAKNKLAADFRRKGIMIALLSGLLYGFYTAFMTLGMSKGVWVEWYGENSGLSAFAVMYLLSALGAATTDSSSALWAMGIAGIRGRFGDFVRCIKTRPGFVMVVAAIIGGPLASTAYVVGLQQAGSIVVPISALCPAIGAILGRFLFKQELNARMLLGIAICFGASAMIGSTGMGTEAPPSLLTGILFGFIAALCWGIEGCVCGYGTSMIDPEIGITIRQVTSGVSNLIILVPLFSMISDVNPVTMVATAFGDGEAMVWFALAGLSAYLTFMFWYKGNAMCGAALGMACNGTFSFWGPFCCWIVLGVAFGYDGWSMPPIAWAAAVVMVFGIFLISMNPMDLLKKRNG

SEQ ID NO: 723 - DNA, 237 bp, Desulfovibrio desulfuricans G20
gtgccgcgtccggaaggcatggtgcaaagactaaacatacgaaattcattgactaaaacgctggtgaagaattgtgaaaaaaatatcttgtttgcccgaacaatcaacaaaaggttcccgcgaccggaatgtcgccgctttgcgcgcaaccgggctgttttctgtgtggtgccggagcgggatgtacatgattgtaccatgttaatgtcatgtaataatttgattaattttgcctaa

SEQ ID NO: 724 - protein, 78 aa, Desulfovibrio desulfuricans G20
MPRPEGMVQRLNIRNSLTKTLVKNCEKNILFARTINKRFPRPECRRFARNRAVFCVVPERDVHDCTMLMSCNNLINFA

SEQ ID NO: 725 - DNA, 111 bp, Desulfovibrio desulfuricans G20
atgcatgccggaatacagcttgtcatgccgcagtgtgcaggtggattgtctgtcctgtccggcaaaagtggcgttaccgttatttcaggcgaagggactctttttttctga

SEQ ID NO: 726 - protein, 36 aa, Desulfovibrio desulfuricans G20
MHAGIQLVMPQCAGGLSVLSGKSGVTVISGEGTLFF

SEQ ID NO: 727 - DNA, 270 bp, Desulfovibrio desulfuricans G20
atgtgcggtgtttccctgtctgtaatcatagaaacgctctattttgcgtgtcgttttcgcatggtggaaaagtttttaaatcaatcggttatctggtgtcgttcaggtgctttacgccactgccgtacctgtggccgggggcgggctgcagacacagcgtttaccctgggggatggctcaaaacggatgggaggatgtgttcagaaggagaaaaacgaggctcagaagggggaaaaagggtacagattccggcttttcacgggcaaataa

SEQ ID NO: 728 - protein, 89 aa, Desulfovibrio desulfuricans G20
MCGVSLSVIIETLYFACRFRMVEKFLNQSVIWCRSGALRHCRTCGRGRAADTAFTLGDGSKRMGGCVQKEKNEAQKGEKGYRFRLFTGK

SEQ ID NO: 729 - DNA, 627 bp, Desulfovibrio desulfuricans G20
atgggagaatacatccggtaccagggcgaagaggcgctggggcttattgaaacgctgggaatggttccggccatctacggcgccgacagcatgctcaaggccgccaacgtccagcttatttcttacgaaaacgtgggctccacacttgtgaccgtcatggtcaaaggtgacgtggccgcggtgcaggcttcggttgacgcaggctcggtggccgcggcgggcataggcaagctgaccgcgcacaatgtcatgccccggcccatcaggcccatcggcgacattgtttccgtgcatgccatcaccgacgacgcacccgctggcgacggcagccgtcccagagccatgggtctcatcgaaacgttcggcatcgtatacgtgcttgaagctgcggatgcaatgctcaagaccgcagacgtcgagctgatcggctacgaaaacgtggcttcgggttatatttcagttctggtgcagggtgacgtggccgcctgtcaggccgccgtggccgcgggcgtaaaggccgtgcaggccatgggtacagatgtttacagctctgtggtcattcccactcctcatccggatgtggccaagattacagcccgttacgcccttgagaatctgctgccctag

SEQ ID NO: 730 - protein, 208 aa, Desulfovibrio desulfuricans G20
MGEYIRYQGEEALGLIETLGMVPAIYGADSMLKAANVQLISYENVGSTLVTVMVKGDVAAVQASVDAGSVAAAGIGKLTAHNVMPRPIRPIGDIVSVHAITDDAPAGDGSRPRAMGLIETFGIVYVLEAADAMLKTADVELIGYENVASGYISVLVQGDVAACQAAVAAGVKAVQAMGTDVYSSVVIPTPHPDVAKITARYALENLLP

SEQ ID NO: 731 - DNA, 1506 bp, Desulfovibrio desulfuricans G20
atgattgtcgataacgatctgatttccatacaggaagccagaattctggcagaaaacgcagggcgcgcacagcgggttctggccacgttttctcaggaacagctggacgagatcgtcgaagccgtagccgaagccgtgggggcgcaggcgcaagcgcttgcggacatggcgtacgaagaaaccgactacggcaacccgcatgacaaggcagtgaaaaaccgctttgtatgcacgcaggtgcgcgagcagctgcgcggcatgcggtgtgtcggcgtcatcggacgggatgagcacgcacgcaccatggacattggtgtacccgtaggcgtcattgccgcgttgtgtccggcgaccagccccgtgtccacaaccatctgcaagacgctcatagccgtcaaatcaggcaacgccgtagttttttcccctcatccgcgcgctgccagaagcatagccgccgcgcttgatatcatgattgatgccgcgcgggctcacggtctgccggaaggatgtctttcatacatgtccacggtaaccaaaagcggtaccgccgaactgatgaaccatcctgccacatcgctggtcatgctttcgggcgtgcccggcatgatagggcttgcgcgctgcagcggcaaacccgtgatttacggcggcaccggcaacgggcctgcatttgtcgaacgctcggccgacatccgccgcgccgtggccgacatcatgctcagcaagacgttcgacaacggtatcgcgccgtccgcggaacagtccatcgtggtcgattcctgcatcgagcgggaagtcagacatgccctgcaggagtgcggcgcatacttcatgacggacgaggagtccctgcggctggcggagcttcttttctgtgccgacggacgccacaaagccggcatggttggtgtgtctgccccggttctggcgcgcagggcaggcatcagcgtgcccgacaacgtgcggctgctggtggcagaacgtaaatatgtttccgaagcagacccgtattcaagggaactgctttcccccgtccttgcctattacgtggaggacgactggatgcacgcctgtgaaaagtgcatcgagctgctgctccacgaacgcaacgctcatactctcgtgatccattccagtaacgaagaggtgattttgcagtttgccctgaaaaaacctgtgggccgtctgcttgtaaacactcccgccacattcggcggcatgggtgtgaccaccaatctcttcccgtccatgacgctgggcagcgggtccgcagggcgcgggatcaccgccgacaacgtgtcgccgatgaatctcatctacatacgcaaggtcggttacggcgtgcggcagtacaccggcgcacaggacgccgcgggatacggttcccgcgtttgcgccgcgcagggcgtcatggcccctcatgacagcgattccagaaaaatgcaggcgttgcaccggatcctgatggaagcgatcggggtcatggacggggcagcacacagatga

SEQ ID NO: 732 - protein, 501 aa, Desulfovibrio desulfuricans G20
MIVDNDLISIQEARILAENAGRAQRVLATFSQEQLDEIVEAVAEAVGAQAQALADMAYEETDYGNPHDKAVKNRFVCTQVREQLRGMRCVGVIGRDEHARTMDIGVPVGVIAALCPATSPVSTTICKTLIAVKSGNAVVFSPHPRAARSIAAALDIMIDAARAHGLPEGCLSYMSTVTKSGTAELMNHPATSLVMLSGVPGMIGLARCSGKPVIYGGTGNGPAFVERSADIRRAVADIMLSKTFDNGIAPSAEQSIVVDSCIEREVRHALQECGAYFMTDEESLRLAELLFCADGRHKAGMVGVSAPVLARRAGISVPDNVRLLVAERKYVSEADPYSRELLSPVLAYYVEDDWMHACEKCIELLLHERNAHTLVIHSSNEEVILQFALKKPVGRLLVNTPATFGGMGVTTNLFPSMTLGSGSAGRGITADNVSPMNLIYIRKVGYGVRQYTGAQDAAGYGSRVCAAQGVMAPHDSDSRKMQALHRILMEAIGVMDGAAHR

SEQ ID NO: 733 - DNA, 2541 bp, Desulfovibrio desulfuricans G20
gtggatctccaggacttttcacataagctcgcggaagcgacaaagaaccttactccggcagaacgtgcttcgctgaagaagattttcgagggcgtatccgccgaggtcttcagccagcccgctcctgtatccgccgtggcaacaggtgcagaatccggcattcccgacgggcctacgccccgtcacgtcaagctgaaggaaaacttcctcaagcaggtgcccagcatcaccgttcagcgcgctgtggccatcaccaaaatcgccaaggaaaaccccggtctgcccaagccgctgctgcgcgccaagactttccggtattgctgcgaaaccgccccgctggtcattcaggaccatgagcttatcgtgggttcgcccaacggtgccccgcgtgccggtgcgttttctccggaagtggcatggcgctggctgcaggatgagctggacaccatcggctcacgtcctcaggaccccttctacatttccgaagaagacaaaaaagtgctgcgggaagaggtgttccccttctggcagaacaagtccgtggatgaattctgcgaaggtcagtaccgcgaagccgacctgtgggaaatgtccggcgaatctttcgtgtccgactgctcctaccatgcggtgaacggcggcggcgactccaaccccggttacgacgtaattctgatgaagaagggtatgcttgatatccagcgtgaagcccgcgaaaagctggaacagctggattacgccaaccctgaagacatcgataaaatctacttctacaagtccgtcatcgagactgccgaaggcgtgatgatatacgccaggcgtctgtcggcctatgccgccgaactggcagcccgggaaaccgacccccgccgcaaagccgaactgcagaagatttccgaggtcaacgcccgtgtgcccgcacatgcgccttccaacttctgggaagccattcaggccgtgtggaccgtggaatctctgctggtggttgaagaaaaccagaccggtatgtccatcggccgtgttgaccagtacatgtaccccttctacagggcagacatcgattccggccgtctgaccgagtacgaagcttttgatctggccggctgcatgctggtgaagatgtctgaaatgatgtggatcaccagcgaaggtgcttccaagttctttgccgggtaccagccttttgtgaacatgtgcgtgggcggcgtgacccgtgaaggccacgatgccaccaacgaccttacctacatgctgatggatgccgtgcgtcacgtgcgtatctaccagcccacgctggccacccgcgtgcacaacaagtctccgcagaagtatctgaagaagattgtggacgttatccgctccggcatgggcttccccgcggtgcattttgacgacgcgcacatcaagatgatgctggccaagggcgtgagcattgaagatgcccgcgactactgcctgatgggttgcgtggaaccgcagaaatcaggccgtctgtaccagtggacctccaccggctatacccagtggcccatctgcatcgaactggtgctcaaccacggcgtgccgctgtggtacggcaaaaaggtaacccccgacatgggcgacctgagccagtatgacacctacgaaaagttcgaagccgccgttaaggaacagatccgctggattaccaaaaacaccagtgtggccaccgtcatttcgcagcgcgctcacagagagcttgcccccaagccgctcatgtcgctgatgtatgaaggctgcatggaatcgggccgcgacgtttctgccggcggtgccatgtacaacttcggccccggcgtggtctggagcggtcttgccacctatgtggactccatggccgccattaaaaagctggtctacgacgacagaaagtacaccctcgcgcagctcaacgaggccctgaaggccgactttgccgggtacgatcagattctggccgactgccttgccgcacccaaatacggcaacgacgatgattacgccgacatgatcgcagccgatctggtgcacttcaccgaaaccgagcaccgcaagtacaaaactctgtattccgtgctcagccacggtacgctgtccatctccaacaacacgcctttcggccagctgctcggcgcctccgccaacggccgcagagcgtggatgcctctttccgacggcatcagccccacacagggtgcggactacaagggccccacagccatcatcaagtccgtttccaaaatggccaacgacaacatgaacatcggcatggtgcacaacttcaagctgatgtccggcctgctggatacccccgaaggtgaaaacggcctgataacgctcatccgtaccgcctgcatgctgggcaacggtgaaatgcagttcaactatcttgataacgaactgctgctggacgcccagaagcatccggaaaaataccgcgacctcgtggtgcgcgtggccggatacagcgccttcttcgtggagctgtgcaaggacgttcaggacgaaatcatcagccgtaccatgctgcatggtttctaa

SEQ ID NO: 734 - protein, 846 aa, Desulfovibrio desulfuricans G20
MDLQDFSHKLAEATKNLTPAERASLKKIFEGVSAEVFSQPAPVSAVATGAESGIPDGPTPRHVKLKENFLKQVPSITVQRAVAITKIAKENPGLPKPLLRAKTFRYCCETAPLVIQDHELIVGSPNGAPRAGAFSPEVAWRWLQDELDTIGSRPQDPFYISEEDKKVLREEVFPFWQNKSVDEFCEGQYREADLWEMSGESFVSDCSYHAVNGGGDSNPGYDVILMKKGMLDIQREAREKLEQLDYANPEDIDKIYFYKSVIETAEGVMIYARRLSAYAAELAARETDPRRKAELQKISEVNARVPAHAPSNFWEAIQAVWTVESLLVVEENQTGMSIGRVDQYMYPFYRADIDSGRLTEYEAFDLAGCMLVKMSEMMWITSEGASKFFAGYQPFVNMCVGGVTREGHDATNDLTYMLMDAVRHVRIYQPTLATRVHNKSPQKYLKKIVDVIRSGMGFPAVHFDDAHIKMMLAKGVSIEDARDYCLMGCVEPQKSGRLYQWTSTGYTQWPICIELVLNHGVPLWYGKKVTPDMGDLSQYDTYEKFEAAVKEQIRWITKNTSVATVISQRAHRELAPKPLMSLMYEGCMESGRDVSAGGAMYNFGPGVVWSGLATYVDSMAAIKKLVYDDRKYTLAQLNEALKADFAGYDQILADCLAAPKYGNDDDYADMIAADLVHFTETEHRKYKTLYSVLSHGTLSISNNTPFGQLLGASANGRRAWMPLSDGISPTQGADYKGPTAIIKSVSKMANDNMNIGMVHNFKLMSGLLDTPEGENGLITLIRTACMLGNGEMQFNYLDNELLLDAQKHPEKYRDLVVRVAGYSAFFVELCKDVQDEIISRTMLHGF

SEQ ID NO: 735 - DNA, 963 bp, Desulfovibrio desulfuricans G20
ttgagaaccgcaacacacagagacgacaccgtgattgaaagaaaagcactgattttcaacatacagaaatacaacatgtatgacggtccgggcgtgcggactctggtgttcttcaaggggtgtcccttgcgctgcaagtggtgctcaaatcccgaagggcaactccggcagtatcaggttctgtacaaggagaacctgtgtgtgcactgcggagcctgtgtgcctgtgtgccctgccggcgtgcacactatctctgcctccacattgcgccacgggtttgcggaaggagcacagtgcatcggctgccgccggtgcgaagatgtctgtccttcctctgcgcttgccgtggtgggcgagcagaaaaccatatcggaacttctggaagtcatcgaagaggacaggcctttttatgaaacctccggcggcggggtgacgctgggcggcggcgaagtgctcatgcagcccgaggcggccgtgaacctgctggcagcctgcaagcagcacggcatcaacaccgccatcgaaacctgcggctatgccaaacaggaagtggtcatgaaggctgcccagtatgtcgatctctttctgtacgacgtcaaacatatcgattccgcaaggcattacgaactgaccggcgtgcgcaacgagctgattctgagcaaccttacctggctgctggaaaacaagcacaatgtgaaaatacgggtgccgctgctgcgcggggtcaacgacagtgaagacgatctgcgcggactggtcgagtacctcagaccgtatcaggattacaaaaatttcaaaggcatagacttgctgccctaccacaagatgggtgtgggcaagtacaagcagctgggctgggaataccccattgagggcaaccccgcactgagcgatgccgaccttgaacgtgtcgaggcctgcatccgcaaatatgactttccggtttcggtgatccgccactga

SEQ ID NO: 736 - protein, 320 aa, Desulfovibrio desulfuricans G20
MRTATHRDDTVIERKALIFNIQKYNMYDGPGVRTLVFFKGCPLRCKWCSNPEGQLRQYQVLYKENLCVHCGACVPVCPAGVHTISASTLRHGFAEGAQCIGCRRCEDVCPSSALAVVGEQKTISELLEVIEEDRPFYETSGGGVTLGGGEVLMQPEAAVNLLAACKQHGINTAIETCGYAKQEVVMKAAQYVDLFLYDVKHIDSARHYELTGVRNELILSNLTWLLENKHNVKIRVPLLRGVNDSEDDLRGLVEYLRPYQDYKNFKGIDLLPYHKMGVGKYKQLGWEYPIEGNPALSDADLERVEACIRKYDFPVSVIRH

SEQ ID NO: 737 - DNA, 624 bp, Desulfovibrio desulfuricans G20
atgacggcactcgggcttatagaaacaaaaggactgcttgcggcggtggaagcggctgatgccatgctgaaagccgctgatgtgcgccttttggaaaagaacctcgcaagcgggggccttgtgaccatcaccgtggcgggcgaagtgtccgccgtgcgggcagcagttgacgcgggtgtatcggctatcaggcgcgtcaacgccgcctcgcttgtttcagagcatgtcatcgcccgtcctgacgaaggagtgagccgcgtcgtgtctctggtacctccggctgccgtgccgcccgccgcaccgcctgtacaggctcccgcgggggattccggcgcacagcagcccgtacaagaagcagcggaggcagaaccgcagaccggctccaccgttgaagaacagactccggctgctgttgaagcaagtccggcgccggcagccgccgccccccgtacggaaacggtccggtacgaaatttcgcaactgaagaagatgaacgtcagcaggctgcggcaggttgcccgcggggtgagcggtctttccataccccgcgaggcggtcaaatctgcgaacaaaaaagatctgattgacgcgatcatcaattcatacaggcagatagaggagtag

SEQ ID NO: 738 - protein, 207 aa, Desulfovibrio desulfuricans G20
MTALGLIETKGLLAAVEAADAMLKAADVRLLEKNLASGGLVTITVAGEVSAVRAAVDAGVSAIRRVNAASLVSEHVIARPDEGVSRVVSLVPPAAVPPAAPPVQAPAGDSGAQQPVQEAAEAEPQTGSTVEEQTPAAVEASPAPAAAAPRTETVRYEISQLKKMNVSRLRQVARGVSGLSIPREAVKSANKKDLIDAIINSYRQIEE

SEQ ID NO: 739 - DNA, 1461 bp, Desulfovibrio desulfuricans G20
atggtagacaaggatttattgtccattcaggaagcccgtgcgctggtgcgcgccgcccgtgttgctcaggctgagtacgctcagctgggtcaggagcgcgtggacgccatcgtcaaggcgattgccgatgccgccgccgctcaggcagagcagctcgccgcactggcagtggaagaaaccggcttcggcaaggtgcaggataaaaagcagaagaatatcctcgccagtgaaaagctgatcgaagccatcaaggatatgaaaaccatcggcgtgctgaacgacgacaaggccagaaaggtcgtcgagatagccgtacccatgggggtcatcgcagggattgttccctccaccaaccccacgtctacgaccatctacaagtccattatttcgctgaagtccggcaacgccattgtgtttacgccgcaccccagcgcaaagaagtgcatcggcagaaccgtggaaatcatccgccgcgtgctgcatgactgcggcgtgagcgaagatctggtgagcgtcatgagcgtgcccaccattgaaggcagcggcgagctgatgcgtcaggctgatcttattctggccaccggcggtcccggcatggtcaaggccgcatacagctccggcacgcccgctctgggtgtgggcgcaggcaacgtgcccgccttcatcgagcgtaccgccgacatcgaagacgccgtggcaaagatttttgccagcaagacgtttgacaacggcaccatctgcgcttctgagcagtccattgtcaccgaagccgtcattgccgacaaagtgcgcgcagcgctggtcagaaacggcggttacttcctcgaaggtgaaaagctggaaaaggtcaagcgcgtcatggagcgcggcaacggctccatgaaccccgccatagtgggccgcgacgccctgcacattgccaaactggcaggcatcgaagttcccgcaggtacccgcctgcttatttccgatgagcccggcgtgggaccccgttaccccttctccaaggaaaaactgacagctcttctcggcttttatgttgtggaagactggaaggaagcctgcgaaatgtgccacgccctgctgaaaaacggcggcatcggccattcgcttgccatccattcgcgcaatgaagaagtcatccgtgaattcggcatgaagaagcccgtttcgcgcatgctggtaaatacgccctcaacgcagggtgccgtgggcctttccacctcgctgttcccctcgttcacgctgggttgcggcgccgtgggcggcagctccacttccgacaacgtcacgccgctgaacctgatgaacgtgcgccgcatcgcgtacgatctgggcaccgtgtgctgccagcccgccgcaccggcagcctgcgcgcagcctgcatcgtctgcctcgtcctccattgacgtgcaggccatcacgcagctgatcgtggaacaactgaaaaaaatggcctaa

SEQ ID NO: 740 - protein, 486 aa, Desulfovibrio desulfuricans G20
MVDKDLLSIQEARALVRAARVAQAEYAQLGQERVDAIVKAIADAAAAQAEQLAALAVEETGFGKVQDKKQKNILASEKLIEAIKDMKTIGVLNDDKARKVVEIAVPMGVIAGIVPSTNPTSTTIYKSIISLKSGNAIVFTPHPSAKKCIGRTVEIIRRVLHDCGVSEDLVSVMSVPTIEGSGELMRQADLILATGGPGMVKAAYSSGTPALGVGAGNVPAFIERTADIEDAVAKIFASKTFDNGTICASEQSIVTEAVIADKVRAALVRNGGYFLEGEKLEKVKRVMERGNGSMNPAIVGRDALHIAKLAGIEVPAGTRLLISDEPGVGPRYPFSKEKLTALLGFYVVEDWKEACEMCHALLKNGGIGHSLAIHSRNEEVIREFGMKKPVSRMLVNTPSTQGAVGLSTSLFPSFTLGCGAVGGSSTSDNVTPLNLMNVRRIAYDLGTVCCQPAAPAACAQPASSASSSIDVQAITQLIVEQLKKMA

SEQ ID NO: 741 - DNA, 285 bp, Desulfovibrio desulfuricans G20
atgtcctcttccaacgcactcggtatgattgaaaccagaggtcttgtgggcgcagtagaagcagctgacgccatggtgaaggccgcaaacgtcaccctgatcggccgttcgcaggtgggcggtggtctggtgaccgtgatggtccgcggcgacgtgggcgcagtgaaggctgcaaccgacgcaggcgcagccgccgccaacaatgtgggcgagctggtaagcgtgcacgtgattccccgtccccacagcgaagtggaaatgattcttcccaaggtggaaggctaa

SEQ ID NO: 742 - protein, 94 aa, Desulfovibrio desulfuricans G20
MSSSNALGMIETRGLVGAVEAADAMVKAANVTLIGRSQVGGGLVTVMVRGDVGAVKAATDAGAAAANNVGELVSVHVIPRPHSEVEMILPKVEG

SEQ ID NO: 743 - DNA, 237 bp, Desulfovibrio desulfuricans G20
gtgggcctgctgtccggtttccgctgttatggccgtcttgtaaaaagtgtgtcagccgcttgccatgcggacagcctttttatgcgcatggtgcgtgtgcgtccggggtgcgcctgcggcacctatgaaaacacaaaggacgctttcagccgggcgcggaggagatgcctcctccgcagcccggtaacgtcacgggattaccgccggcggacagaatctccgcaggggcacccgtga

SEQ ID NO: 744 - protein, 78 aa, Desulfovibrio desulfuricans G20
MGLLSGFRCYGRLVKSVSAACHADSLFMRMVRVRPGCACGTYENTKDAFSRARRRCLLRSPVTSRDYRRRTESPQGHP

SEQ ID NO: 745 - DNA, 705 bp, Desulfovibrio desulfuricans G20
atgaacgaaaaagccatgcaggaagcccttgagggcgttatccgcagcgtcatggatcagttggggagccgcggcggtgaagtttccgcctgcggcgtgaacacggatgaagaaattcccgtggagctgtcggcgcgccatgcccacctgagcgaagaagacgccattgccctgttcggcgggccgctcacccctgtgcgcgaactttcccagccgggacagtttctgtgcaaagagcgtgtacggcttatcggtcccaaaggcgtcatcgacaacgttgcggtgctcggtccttcgcgcggccgttcacaggtagaagtttccaagaccgacgcccgcattctgggcacatcggcccctgtgcgtcagtccggtgacgtggcgggcactccgggcatcattctcgcttcgcaggacggtattgtggggctggaagaaggtctgatcgtcgccgcccggcatattcacatgtctaccgaagacgccgcccgcttcggtgtgcacgacaacgatctggtcagtgtccggcttgaaggcgaacgcccccttattctggaagacgtgctggtgcgtgtcagcgattcgttcaggctggccatgcatatcgacgccgacgaaggcaacagctccggctggaacaagagcgtcagcggcagaatagtgggcagaaagtgcggagcggataatggactttgccgccattga

SEQ ID NO: 746 - protein, 234 aa, Desulfovibrio desulfuricans G20
MNEKAMQEALEGVIRSVMDQLGSRGGEVSACGVNTDEEIPVELSARHAHLSEEDAIALFGGPLTPVRELSQPGQFLCKERVRLIGPKGVIDNVAVLGPSRGRSQVEVSKTDARILGTSAPVRQSGDVAGTPGIILASQDGIVGLEEGLIVAARHIHMSTEDAARFGVHDNDLVSVRLEGERPLILEDVLVRVSDSFRLAMHIDADEGNSSGWNKSVSGRIVGRKCGADNGLCRH

SEQ ID NO: 747 - DNA, 822 bp, Desulfovibrio desulfuricans G20
atggactttgccgccattgataagcagataagcgcgctcgaggcgtgcatagattccactgtggaggtcacccccggcgaacagctgtccgtcggggtcgacctgggtacggcatacatcgttgtggtggtgcttaatgccgcaggcagtcctgtggcctgtgccatggagtttgcgcaggtcatcaaggacggactggtggtggattatgtgggtgccacccgcattgtgcgccggcttgtgcagcagctggaagaacgtctcggcaggcagctgacccatgcggccattgccgtgccgcccggcaccggccacaaagacagcaacacccaccgccatgtggtggaaggggcagggctggaagtgactgcgattctggacgaacccacggcggccaatgctgttctgggtgtgcaaaacggagtcattgtggacatcggcggcggcactaccggactttcggtcatagaagacggcaaagtcacctatgtggcggatgaacccaccggcggaactcatgtttccctcgtgctggcaggaagctaccgcatcagctttaccgaagccgaagaactgaaaaaagatcaggaccgccagcgcgaaattttgcccgtggtgcgtcccgttattcagaagatggcttccattgtgaaccgccatatcgagggtcgcgatatttcggccatctatcttgtgggcggcacatgctgcctgaaagatttcgagacggtgtttgaaaaggaaaccggcagacccgtgtacaagccggccaatccttttcttgtaacgccgctgggcatagccctgaactgcaacgcgtag

SEQ ID NO: 748 - protein, 273 aa, Desulfovibrio desulfuricans G20
MDFAAIDKQISALEACIDSTVEVTPGEQLSVGVDLGTAYIVVVVLNAAGSPVACAMEFAQVIKDGLVVDYVGATRIVRRLVQQLEERLGRQLTHAAIAVPPGTGHKDSNTHRHVVEGAGLEVTAILDEPTAANAVLGVQNGVIVDIGGGTTGLSVIEDGKVTYVADEPTGGTHVSLVLAGSYRISFTEAEELKKDQDRQREILPVVRPVIQKMASIVNRHIEGRDISAIYLVGGTCCLKDFETVFEKETGRPVYKPANPFLVTPLGIALNCNA

SEQ ID NO: 749 - DNA, 594 bp, Desulfovibrio desulfuricans G20
gtggatgtcaacgaactggcagcagccatagcccgtcaggtactgcagcaactgcgggaaactccgcagaaaacctgtgtgatggtgctggaacagcgcgatgcgcatcttgccgagatggtcagaggctatctgggagaagatgccgacctgctgttctgcggtgaagacaccgcaggcagaacgccgtcgcgctacatcctgccgtatgtgacatgcaccgaaatggctgatctggcagcgggccgcgcccagacgcctgttcagcaggaagttctcagactgctgctgtccggcgtgccggtcgaagcgctggagttcgagtacaaaacctacgccgaaacggcaccgggaccgcttttcagcctgtatcaggcatacgagaaaacgctggcctcttacggcctgagaccgtttgcgcataaagcgcctgacgcggtgcggcactggcagaatcttgtgaccgcccccgtggtggaacaagcggcacagacaggtgccgcctgcctgtgtgtgcgccgcgatgcagtgattacgccgctggcggcggaagctgcaaaaaacctgaacatcagcatacacagacagctgtga

SEQ ID NO: 750 - protein, 197 aa, Desulfovibrio desulfuricans G20
MDVNELAAAIARQVLQQLRETPQKTCVMVLEQRDAHLAEMVRGYLGEDADLLFCGEDTAGRTPSRYILPYVTCTEMADLAAGRAQTPVQQEVLRLLLSGVPVEALEFEYKTYAETAPGPLFSLYQAYEKTLASYGLRPFAHKAPDAVRHWQNLVTAPVVEQAAQTGAACLCVRRDAVITPLAAEAAKNLNISIHRQL

SEQ ID NO: 751 - DNA, 276 bp, Desulfovibrio desulfuricans G20
atgattatcggcaaggtgatcggcaatgtgtgggccacgcgcaaggaagacgccctcaacggactgaagctgatggtggtgcagcgcgaagacgcctgcagccgcagcagccatgaaagttttgtggccgtggactgtgtgggcgccggaacggatgagcgtgttcttgtggttaccggcagctctgcgcgcaaggcgctgggcaatcctgatgcccctgtggatgccgccattgtgggtattatcgacgaagtgaaaatcagaccggagagctag

SEQ ID NO: 752 - protein, 91 aa, Desulfovibrio desulfuricans G20
MIIGKVIGNVWATRKEDALNGLKLMVVQREDACSRSSHESFVAVDCVGAGTDERVLVVTGSSARKALGNPDAPVDAAIVGIIDEVKIRPES

SEQ ID NO: 753 - DNA, 549 bp, Desulfovibrio desulfuricans G20
gtggatacgctggggctggttgaaagcagaagcatcgccgccggagtgaatctggcggacggcatggtcaaggtggcgcaggtggaacttgtgcgcgccggcaccatctgttccggccgctactttatctgtctcgggggcgacaggcaggccgtgcagacggctgtcagccatgcggaacagtccggcagcgcgcttgccggcagttacgtgatttccggcgtgtcgccgcaggtgctggcggtgcttaaaaaaagcgtgcagcccggtaccccgggcgcgctgggcgttgtggaatgccgcactgtttccgccggtattgccgcagcggatgccgcggtcaaacgctccggcatcagcctgctgcgtcttgtgacagggcagggcatcaacggcaaatcatatttcgtgttcagcggtgatgtagcatctgtgcaagaagccgcagacgctgcaaaaacagctttgggcaggcatcttatcgagtcggtggtcatagccagaccggacgcctcggtcgtcagggccctaacaagcggtgtgaggtaa

SEQ ID NO: 754 - protein, 182 aa, Desulfovibrio desulfuricans G20
MDTLGLVESRSIAAGVNLADGMVKVAQVELVRAGTICSGRYFICLGGDRQAVQTAVSHAEQSGSALAGSYVISGVSPQVLAVLKKSVQPGTPGALGVVECRTVSAGIAAADAAVKRSGISLLRLVTGQGINGKSYFVFSGDVASVQEAADAAKTALGRHLIESVVIARPDASVVRALTSGVR

SEQ ID NO: 755 - DNA, 351 bp, Desulfovibrio desulfuricans G20
atgaaaaagaaacttgtaggggtggagtgccttaacgagtacatctgccagtccagcaacaaattgtatgcagacagctcggttattctgacgcccggcgccagggatgaactgagcagacgcggtgtgaccgtggtgtacggcccccgccccgaatcgggcgaagcacctgccgcctgcccgcccggatgcacgtgcccggcctgcaccgccgcaaaggcggacagcggacttgaacagcttctttttgccgtggcggccatgctgaagaccgaatacggcataaccgaccctgaagagctgaagaacctcagctgtcaggcactcagaaccatcaaagcgaacctttaa

SEQ ID NO: 756 - protein, 116 aa, Desulfovibrio desulfuricans G20
MKKKLVGVECLNEYICQSSNKLYADSSVILTPGARDELSRRGVTVVYGPRPESGEAPAACPPGCTCPACTAAKADSGLEQLLFAVAAMLKTEYGITDPEELKNLSCQALRTIKANL

SEQ ID NO: 757 - DNA, 279 bp, Desulfovibrio desulfuricans G20
atgatgaatgctcttggtatgatagagaccaaaggtctggttggcgcagtggaagctgccgatgccatggtaaaggctgccaatgttgaactgatcggccgcgaacaggtgggcggcggtctggtgaccgtgatggtgcgcggagacgtgggtgccgtaaaggccgccaccgacgccggtgcagcagccgcaggccgcgtgggcgaactggtcagcgtgcacgttattccccgcccgcacagcgaagtggaactgattctgcccaagcgttccaaatag

SEQ ID NO: 758 - protein, 92 aa, Desulfovibrio desulfuricans G20
MMNALGMIETKGLVGAVEAADAMVKAANVELIGREQVGGGLVTVMVRGDVGAVKAATDAGAAAAGRVGELVSVHVIPRPHSEVELILPKRSK

SEQ ID NO: 759 - DNA, 135 bp, Desulfovibrio desulfuricans G20
atgaccgtggggcgtacatgtcggggactcccgccgcgtgtgcgcctgtgtgaagatgctggacagaaagagcaccggcacatgcagggcataccctgtccgccggcctgcctgaacggcatcagccgggagtaa

SEQ ID NO: 760 - protein, 44 aa, Desulfovibrio desulfuricans G20
MTVGRTCRGLPPRVRLCEDAGQKEHRHMQGIPCPPACLNGISRE

SEQ ID NO: 761 - DNA, 234 bp, Desulfovibrio desulfuricans G20
atgcctgcccgattcccgaccggcagcagccggttttctgacggccgtgacagcattgctgtggcgtcgcggccgtcagaaaccgctccggaccgcaagggcgggcgcaacggcgcagcacacggcccgcattgtccgcatggtgcgcggacagccgcagacggcacagccgcagacggcacggccgcagtatgccgccgcaacataaccaaatgctcaacaatcgtatattaa

SEQ ID NO: 762 - protein, 77 aa, Desulfovibrio desulfuricans G20
MPARFPTGSSRFSDGRDSIAVASRPSETAPDRKGGRNGAAHGPHCPHGARTAADGTAADGTAAVCRRNITKCSTIVY

SEQ ID NO: 763 - DNA, 1110 bp, Desulfovibrio desulfuricans G20
gtgacacagttctacggaaaaacaaaaatctgctatggcgaagatgcccttgagacccttgagcgccttcccatcaagcaggcgttcatcgtcaccgatccgttcatggtgaagaccggtttcatcgacaggctcataagtcatcttgatctgggcggcatccgtcaccgcgtgtttgacggtgtggagccggatccttcgctggaaacagtcaccaaaggtacccacctgtacatgcaggatcatgccgaagctgtcatagcgctcggcggcggttctgccatcgacgcggccaaggccatagccttttttgccagcaaggttgatacctcgcggccgcggcccattctggtggccattcccaccaccagcggcaccgggtctgaagtcacggccatatcggttgtgacggacaaggtgaacgaggtgaagattccgctcaatgacgaacagctcattcccgatctggccatccttgatgcgcggttcacccgtacgctgcccccctcggtgacttccgtcaccggtatggatgtgctgacgcatgccattgaagcatatacctcgcgcaaggcaaacgcgtttacgtccatctacgcggaatatgccatcaggtatgttttcgaatatctgccccgcgcgtaccgctgcagcgacgatatggaagcccgtgagaaaatgctgcttgcctcctgcatggcaggtatggccttcaacaacagcgggctgggcatcacccacagcatagcgcacagcctcggcggtatttttcatgtgccgcacggacttgccaatgccgtggtgctgcctttcgtcattcagttcaacagctttgacgctgcggtgcagtaccgcgaaatcgcacagatgctgtctctgcctgccggttcggtgggcgagggcacccagagccttatcaaggccgtgcgcgaactgaacgaatccatgggaatacccaacagaataggtgctcttaaaatagaagagagtgcttaccgccagcatgccgatgtcatcgccagaaacgtgctggacgatatatgcaccgcaggcaatccgagaatgccttcgcgggccgatatcagaatgctgctggaacaggcatggtag

SEQ ID NO: 764 - protein, 369 aa, Desulfovibrio desulfuricans G20
MTQFYGKTKICYGEDALETLERLPIKQAFIVTDPFMVKTGFIDRLISHLDLGGIRHRVFDGVEPDPSLETVTKGTHLYMQDHAEAVIALGGGSAIDAAKAIAFFASKVDTSRPRPILVAIPTTSGTGSEVTAISVVTDKVNEVKIPLNDEQLIPDLAILDARFTRTLPPSVTSVTGMDVLTHAIEAYTSRKANAFTSIYAEYAIRYVFEYLPRAYRCSDDMEAREKMLLASCMAGMAFNNSGLGITHSIAHSLGGIFHVPHGLANAVVLPFVIQFNSFDAAVQYREIAQMLSLPAGSVGEGTQSLIKAVRELNESMGIPNRIGALKIEESAYRQHADVIARNVLDDICTAGNPRMPSRADIRMLLEQAW

SEQ ID NO: 765 - DNA, 1329 bp, Desulfovibrio desulfuricans G20
atgactggacagacggtggagtgtattcgatcagcaggggttgtcggagccggcggtgccggtctgcccacccatatcaaggccgatgcctcggtggatactgttctggtgaacggtgcttcatgtgagccgctgctcatgagcgatccctacctcatacaggcgcatcccgatatcgtcatccgcggtcttctggccgtcatggactgcactggcgcccgtcgcggcatcatctgcctgaaaggcaaacacgcggcagccatggctgcagtgcgcggggctgtgacccgcgagggttccggacggcttgaggtgtttgagctgcgcgacttttatcctgccggtgacgaacatgtgcttgtgcacgaagtgctgggcagaaccgtgccgcaggggggcatcccgttgcagataggggccgtggtgagcaacgtggaaaccctgtataatgttgctctggccatggagggcgcgcccgtcactcaccgttatgtgacggtgtcgggcgaagtgaaaaggcacatggtggtcaaggtgccggtgggcactcttgtttccgacgtgctgacctttgcgggcggtcccgccataactgagtataaagtggtggacggcggcccgatgatgggccgcgtcctgccccacaccggcagacccgtgaccaaaacgaccagcggcctgctggtgctgccgcccgatcataccgttgtggcgcgcaagataatggaccccgaaaaagtccgcaggataaccaccagcatctgctgccagtgttcgcactgtaccgacctgtgtccgcgcaatctgctggggcactcgctgcatccgcaccggcttatgcgcgtgcttgagggccagatgcacgccggtaccgtggcgcgggaagctctgctgtgttccgaatgcggcctgtgtgaaaaatttgcctgccccatgatggtttccccccgcgagatcaacgcgcagatcaagcaggtgctgcgccgcgagggagtgcgctgggaaagcacaggcgaagaaccggtgccgcatcctttcagaaaaagcagatatgtggccaccggcagactgctgcgccgccttgatctggtgcagtacgatacacaccccggctacgcaggcgaatatacgccgcacatggtgcgcatacctcttgcccagcatatcggtgccccggccgtgtgcgtggtggcccccggagacactgtcagaacgggtgatcttatcggagaaatacccgaaaagagcatgggggcgcgcgtgcatgccagcatcagcggcagggtcgagtccgtggaagacggcatggtaaccatcaaggcttgttaa

SEQ ID NO: 766 - protein, 442 aa, Desulfovibrio desulfuricans G20
MTGQTVECIRSAGVVGAGGAGLPTHIKADASVDTVLVNGASCEPLLMSDPYLIQAHPDIVIRGLLAVMDCTGARRGIICLKGKHAAAMAAVRGAVTREGSGRLEVFELRDFYPAGDEHVLVHEVLGRTVPQGGIPLQIGAVVSNVETLYNVALAMEGAPVTHRYVTVSGEVKRHMVVKVPVGTLVSDVLTFAGGPAITEYKVVDGGPMMGRVLPHTGRPVTKTTSGLLVLPPDHTVVARKIMDPEKVRRITTSICCQCSHCTDLCPRNLLGHSLHPHRLMRVLEGQMHAGTVAREALLCSECGLCEKFACPMMVSPREINAQIKQVLRREGVRWESTGEEPVPHPFRKSRYVATGRLLRRLDLVQYDTHPGYAGEYTPHMVRIPLAQHIGAPAVCVVAPGDTVRTGDLIGEIPEKSMGARVHASISGRVESVEDGMVTIKAC

SEQ ID NO: 767 - DNA, 552 bp, Desulfovibrio desulfuricans G20
atggatttgcgtactatcggatgtgtggagctgaacagcgttgccatgggcatgcatactgcggatgaaatggtaaaggctgctgaagtggaactggtggtggcccgtcccacctgtccggggcggtatatagccattgtggccggtgataccggcgcggtgaaaagcagtgtggaaacaggctgccgcataggcggtgaaatgcttgttgactcttttgtgctggccagtgtgcatcccgacgttattccggcattgggcggcgcccccgaagatgcctccataaatgcactgggtgtcatagaaacctgtacctccgcttcctgtattcttgccgcggatgccgcggcaaaagccgcacaggttcatctgctcgaaatccgctttgcagccggacttgccggcaaggcttttgtggtcatgaccggcgatgtcagttcggtgcaggcggccgtagaagcaggagtggccggtgtgggcgaatccggtccggtgctcagccatgtggtcattccttctcctagtgaagggctgaaggccagaattttgtaa

SEQ ID NO: 768 - protein, 183 aa, Desulfovibrio desulfuricans G20
MDLRTIGCVELNSVAMGMHTADEMVKAAEVELVVARPTCPGRYIAIVAGDTGAVKSSVETGCRIGGEMLVDSFVLASVHPDVIPALGGAPEDASINALGVIETCTSASCILAADAAAKAAQVHLLEIRFAAGLAGKAFVVMTGDVSSVQAAVEAGVAGVGESGPVLSHVVIPSPSEGLKARIL

SEQ ID NO: 769 - DNA, 360 bp, Desulfovibrio desulfuricans G20
atgtctgtattcggtaacgagccgagacaaagggtcattcaggaatatgtgccgggcaaacaggtgacgcttgcccatgtcatcgccagtccgcagcaggggctgtacctcaagctcgggcttgacggcgagacagcaggcgctctgggtattctgaccatcactcccagcgagggggttatcatcgcggcagatatcgccaccaaggcggcctctgtcgaaataggcttccttgaccggttcggcgggtctttggtgctggtgggcgatgtggccagcgtggaagcttcgctcaaggctgtgctgggatattttgacgatgtgctgcagtacgccgttgtgggactgacaaggtcgtag

SEQ ID NO: 770 - protein, 119 aa, Desulfovibrio desulfuricans G20
MSVFGNEPRQRVIQEYVPGKQVTLAHVIASPQQGLYLKLGLDGETAGALGILTITPSEGVIIAADIATKAASVEIGFLDRFGGSLVLVGDVASVEASLKAVLGYFDDVLQYAVVGLTRS

SEQ ID NO: 771 - DNA, 423 bp, Desulfovibrio desulfuricans G20
atgaagaaagtcatgcttatcggtgagaccggagcgggcaaaagttcgcttatccgggcgctgtccggcggggaatttgttccccgcaggggtatggctgtggaatactacggccggtttatcaacaccccaggcgagtttctggaaaaccgccggttttactatgcgcttatcaccaccgcggcggactgcgacctgctgctgatggttcaggacgccacacgcagcacgtctctttttcccccgcgtttcgctcccatctttaaccgcagggtggtgggtgtcatttctaaaagcgatgcctccgaagcccgtttttcccgtgcggagcagtttctgctcagtgcgggggcgcgcgagattgtccgcgccagtgttgtttctccggacggactggatgccctgaaaacagttctctcctga

SEQ ID NO: 772 - protein, 140 aa, Desulfovibrio desulfuricans G20
MKKVMLIGETGAGKSSLIRALSGGEFVPRRGMAVEYYGRFINTPGEFLENRRFYYALITTAADCDLLLMVQDATRSTSLFPPRFAPIFNRRVVGVISKSDASEARFSRAEQFLLSAGAREIVRASVVSPDGLDALKTVLS

SEQ ID NO: 773 - DNA, 555 bp, Alkaliphilus metalliredigens QYMF
gtgacccagacaacaaagaaggctatggcagcatcccttaaagagcgcttggaaaaaacaacgcttcaaaacattacggtgaaggatattgtgaaagattgcgaaatcaaccgtcagacattttactatcattttcaggatagctttgccttaatggaatggatttttgaaacagaaggtacgaaagcaatttctaacaataaaacctatgacacctgggaacgaggatttttacaggcatttcagtatgtggaacaaaacaaaatgcttgtacttaatgcatatcattctatgggtcgtgaacacgtagagcggtacttgtatagtgtggtttacaggttgctgataaatgtaatcaatgagcaagcgaaaggtatgaatgtacctgaagatgacaaggggtttattgctcatttttataagtatgtctttgtagggctaatgttggagtggattcatcaaggtatgaaagagtgtccaaaggatattgtcgataggttgagtaaattgattacaggggatatccataaggcgctacttaagtatgagcagtaa

SEQ ID NO: 774 - protein, 184 aa, Alkaliphilus metalliredigens QYMF
MTQTTKKAMAASLKERLEKTTLQNITVKDIVKDCEINRQTFYYHFQDSFALMEWIFETEGTKAISNNKTYDTWERGFLQAFQYVEQNKMLVLNAYHSMGREHVERYLYSVVYRLLINVINEQAKGMNVPEDDKGFIAHFYKYVFVGLMLEWIHQGMKECPKDIVDRLSKLITGDIHKALLKYEQ

SEQ ID NO: 775 - DNA, 1176 bp, Alkaliphilus metalliredigens QYMF
ttgaagaattttaaagaaatgactgaaattgtacatggaattgatgcaatacaatacttggaaagattcaaaaataaaagggcttgcattgtcaccgatcccacaatggttcaattgaaagttgttgaccgtgtaaccgaaatttttgatagaaataagatagactatgatgtgttttctgaagtggagccagatccctcctttggggttgtctacaaaggtttaaatcacattattaaaaacaaaccagagctactcattgcagtgggaggtggttctgccattgatgccgctaaggccatcatgtatttttgtattaaaattaaagaaagcttattggatacccaagaaatacccaagcctttttttattgcaatacctactactagtggtacgggatctgaggtcacagcctattctgtgataacagataaagaaaagaatataaaaatccccatcattgactctttaatggtacctgatgtggctatattagatcctatattcaccaaaaccataccatcccatgttacagcagatacaggaattgatgtcttgacccactgcgttgaggcttatgtttctaaggatgcttcggattttactgatgccctagttgaaaaagccactgtccaggtgtttcggtatttaccagtagcctacaaggatgggtctaatatggaagctagagaaaagcttcacaatgcttcttgtatggcaggaattgcctttacaaatgctggattaggaattaatcatagtatggcccatagtttagggagtcattttaagatgtcccatggtcggagcaatgccatattaatgccctatattattgcatttaatagtaaaggtcaggataaaaccgggtataatccagcagcagtgaaatacgctgagctggcaaaatacatagggcttcccaactctacagtcgaaacaggggtcttgggtttaattgaagccatcaaagtcatgaagatcgccatgggaattcctgcaactataaaagaagctggtgtggatcgggaaagcttcatgaattcattggatgaaatttctgccatggcattggaagacatttgcactagtagtaatccaaagaaagtctctaaagaggatattaaaaacatttatttagaagcctatgatagaaactccggtttatctttttga

SEQ ID NO: 776 - protein, 391 aa, Alkaliphilus metalliredigens QYMF
MKNFKEMTEIVHGIDAIQYLERFKNKRACIVTDPTMVQLKVVDRVTEIFDRNKIDYDVFSEVEPDPSFGVVYKGLNHIIKNKPELLIAVGGGSAIDAAKAIMYFCIKIKESLLDTQEIPKPFFIAIPTTSGTGSEVTAYSVITDKEKNIKIPIIDSLMVPDVAILDPIFTKTIPSHVTADTGIDVLTHCVEAYVSKDASDFTDALVEKATVQVFRYLPVAYKDGSNMEAREKLHNASCMAGIAFTNAGLGINHSMAHSLGSHFKMSHGRSNAILMPYIIAFNSKGQDKTGYNPAAVKYAELAKYIGLPNSTVETGVLGLIEAIKVMKIAMGIPATIKEAGVDRESFMNSLDEISAMALEDICTSSNPKKVSKEDIKNIYLEAYDRNSGLSF

SEQ ID NO: 777 - DNA, 1104 bp, Alkaliphilus metalliredigens QYMF
atgaacattaatgaaattattgtctatattatggttggatttatggtattgggtgcgttagataaaatcataggcaacaaatatggtttaggagaaaagtttgatgaaggaatgatcgcaatggggtctttagctgttgcaatggtcggagttgtttctttagctccagttttagcgacaattttggagccaatggttgtaccagtttatacatttttaggtgcagaccctgctatgtttgcaaccacattattagctaatgatatgggtggataccctctggccatgcagttggcccaaactcaggaggcagggctatttgctggattaatcctaggagccatgatgggaccaacgattgtgttcacaatacctgtggccctgggcattattaaaaaagaagatcacaaatatttagcaacaggggttttagcagggatggtgacgattcccataggcgcttttgttggtggcgtggtggctggatttgatatttcaatgattttaagcaacctagtccctattattttagtttctttattgctttctcttggattatggaagatgcctgagaaaatgattaaaggatttactgtttttggtaaaggtgttgtggtggtgattacaatcggtttggcggctattattgtggaaaccttaacgggttttgtggtaatccctggcatggcaccaatatccgatggaatcgaaatcgtaggggagattgccattatgctagcaggggccttcccaatggtttatgtggtcaccaaggtatttaataagcctcttatgaagatggggaaactattgggaatgggagatgttgctgctgcaggcatggtagctactctagccaataatattccgatgtttggattaatgaaggatatggataatcgtgggaaaatcattaatgttgcctttgcagtcagtgcttcctttgttctaggagatcatcttggatttactgctggtgtcaaccaagatatgattttcccaatggtagtaggtaaaatggtaggtggcgtgactgctgttatggtggctatttttattgccaacaaaagcatgtcaaaggaagatgcagttaagcaacactaa

SEQ ID NO: 778 - protein, 367 aa, Alkaliphilus metalliredigens QYMF
MNINEIIVYIMVGFMVLGALDKIIGNKYGLGEKFDEGMIAMGSLAVAMVGVVSLAPVLATILEPMVVPVYTFLGADPAMFATTLLANDMGGYPLAMQLAQTQEAGLFAGLILGAMMGPTIVFTIPVALGIIKKEDHKYLATGVLAGMVTIPIGAFVGGVVAGFDISMILSNLVPIILVSLLLSLGLWKMPEKMIKGFTVFGKGVVVVITIGLAAIIVETLTGFVVIPGMAPISDGIEIVGEIAIMLAGAFPMVYVVTKVFNKPLMKMGKLLGMGDVAAAGMVATLANNIPMFGLMKDMDNRGKIINVAFAVSASFVLGDHLGFTAGVNQDMIFPMVVGKMVGGVTAVMVAIFIANKSMSKEDAVKQH

SEQ ID NO: 779 - DNA, 549 bp, Alkaliphilus metalliredigens QYMF
atgataaaaaccataggattaatagaattaaatagcattgccaagggaatagaaaccggtgatgccatggttaagacagccaatgtagagttattaaaggcccactctgtctgtcctggtaagtacattttactgatatgcggcgatgtgggagctgttgaaacagccatagagactggaatcaaaataggtggaggatacgttgttgatcatctcattttacctagtatacatccccaattaatcgatgccatccatggtaccaatagtgtacaagaagtgagtgccattggggtgctggaattttttaatatcgccacatctattgttgcggcagatgctgctgccaaggctgctgctgtaacccttatggaaattcgcttaggtctttctatagggggcaagtcctttgttacattatgcggggatgtcagttctgttcaggaggcggtggaagctggggcgacaataggtaaggaaaaggggatgttagtagaaaaatgtgtcattccatctccacgaaaagagctatttgaaaaactattataa

SEQ ID NO: 780 - protein, 182 aa, Alkaliphilus metalliredigens QYMF
MIKTIGLIELNSIAKGIETGDAMVKTANVELLKAHSVCPGKYILLICGDVGAVETAIETGIKIGGGYVVDHLILPSIHPQLIDAIHGTNSVQEVSAIGVLEFFNIATSIVAADAAAKAAAVTLMEIRLGLSIGGKSFVTLCGDVSSVQEAVEAGATIGKEKGMLVEKCVIPSPRKELFEKLL

SEQ ID NO: 781 - DNA, 1347 bp, Alkaliphilus metalliredigens QYMF
atggatattttagaaaagatatttgaagccggcgttgttggagcaggtggagctggttttccaacccatattaagcttgatggtgtggcagagtacctactggttaatgcagtggagtgcgaacccctactagaaaccgataagtttatcacacgacataagagtgaagaaattattaaagccatggaaatcatggggaatcacatccaagcaaaggaaatggttattgggttaaagaaaaaaaacaccaaagaaattcaagcactaagagaagcgatacaatgcttgaaatctaaggtaacacttcatttggttgaaaatttttatcccgcaggggatgagcaaatgctagtctacgaaatcaccaaaaggcaagtacctccagggggaatccctaaggatgtgggtgttgtggtatgtaatgtagggacagtggtcaatatttatgaagccttaaatgaaaaacctgttactcataaattggtgacgatcttaggagaagtgaaaaacccctctatggtgtacgcacctattggaactcccattgagaagtgtatcgaaatggtgggaggaccaaccatacaggcgtatcgcattgtcctaggggggcccatgatgggcagggtaatcgaaaaaagtcagttaaatcaagaggtggtcaccaagacaaccggtgggatcattgtacttcctgaagaacattttatgttaagggataaacaacaggatttgacacaaatgattaatagaagtcgatctacttgtatccaatgctctctttgtacggatctatgtccaagaaatttaattggccatcccctacgaccccatcgaatcatgagaaccctgtcgggagataaggagcagtatggggtactgaaggaagcccttttatgctgtgagtgcggtgtatgcgaggtatatgcctgtcccatggggcaaactccaaaaaacattaacgtagaaatcaaaaatcttcttcgccaggagggcataagatattcagatacatccgtgaaaaatgaagttaatgggatgcgtgaatatagaaaagtgccagctgaaagacttttagctagattagagctttctgggtatgcagatcaggttaaggatgggtactgttctattgagcctcatcgggtaaaaataccactgaaacaacacattggaaagcctgcaacacctattgttgaggtgggaagtttagtagaaaaagggcaattgattgccagggtaaatgcaggggatttaggagctaatatccatgccagtatgcaaggtgtggttagtgagatcaatgagtttatctggattgaggctggagaaaaggcggtgatacaatga

SEQ ID NO: 782 - protein, 448 aa, Alkaliphilus metalliredigens QYMF
MDILEKIFEAGVVGAGGAGFPTHIKLDGVAEYLLVNAVECEPLLETDKFITRHKSEEIIKAMEIMGNHIQAKEMVIGLKKKNTKEIQALREAIQCLKSKVTLHLVENFYPAGDEQMLVYEITKRQVPPGGIPKDVGVVVCNVGTVVNIYEALNEKPVTHKLVTILGEVKNPSMVYAPIGTPIEKCIEMVGGPTIQAYRIVLGGPMMGRVIEKSQLNQEVVTKTTGGIIVLPEEHFMLRDKQQDLTQMINRSRSTCIQCSLCTDLCPRNLIGHPLRPHRIMRTLSGDKEQYGVLKEALLCCECGVCEVYACPMGQTPKNINVEIKNLLRQEGIRYSDTSVKNEVNGMREYRKVPAERLLARLELSGYADQVKDGYCSIEPHRVKIPLKQHIGKPATPIVEVGSLVEKGQLIARVNAGDLGANIHASMQGVVSEINEFIWIEAGEKAVIQ

SEQ ID NO: 783 - DNA, 285 bp, Alkaliphilus metalliredigens QYMF
ttgattataggaaaggtaatcggtaatgtatgggccactagaaaagatgaaaccttaaatgggttaaagcttttagtgattgaatccatagattatggtagaaaccaaagaggagagtcctttgtagcagtggacggcgtcggtgcgggcattggagaacgggtcttggttgtaaaaggaaatgccgcaaggaaggcccttcaaaaagagggtgcggcggtggatgccacaatagtagggatcatagatgaggtagaagtgacattacaaaataacagtgagtaa

SEQ ID NO: 784 - protein, 94 aa, Alkaliphilus metalliredigens QYMF
MIIGKVIGNVWATRKDETLNGLKLLVIESIDYGRNQRGESFVAVDGVGAGIGERVLVVKGNAARKALQKEGAAVDATIVGIIDEVEVTLQNNSE

SEQ ID NO: 785 - DNA, 738 bp, Alkaliphilus metalliredigens QYMF
atggagatagaagtattggttcaaaagataacagaggaagtaatgaaacagcttaaaggaagacaaaaaaatgaaaaacctcaattctcgaaaaaagccctgatactttcggataaaaatccaataaacaaacaagagataaggcaattggagaccatgggggttgaatgtgtatctttaggagaatgtcctgaagatgaaataagaaacatggattatattatcctgttgaccctgcccttaagcagtttaagctatattgctagaggggttgagggagatgagatttctaaaggtgccattggaggtctgttatatggaaaagagatttttgttttgtgtgaaggaatagagcacagaaagtttgaacaaaccagtcagcatcatttctatcagatgtatatggactatgaaaagaagctgcagggctttggtgttaaaatagggaccctaaagaaaatattgtctcttcttaaccaaaaaccacagcaggagcaatcctccacagaagcgataaagcaagctgaagaaatcagaaaaactgaagaatcagtgaaaacagagcaagtagatgaaaaagaaagccctttgataagtaataaactgattactgagaatacattgaaggaaatgggctgcagagaaaaaagcaggatttccattactgcaaaggcaatcgttacccccatggcaaatgattatattagaatgatgaagatacaagttattagagtgtag

SEQ ID NO: 786 - protein, 245 aa, Alkaliphilus metalliredigens QYMF
MEIEVLVQKITEEVMKQLKGRQKNEKPQFSKKALILSDKNPINKQEIRQLETMGVECVSLGECPEDEIRNMDYIILLTLPLSSLSYIARGVEGDEISKGAIGGLLYGKEIFVLCEGIEHRKFEQTSQHHFYQMYMDYEKKLQGFGVKIGTLKKILSLLNQKPQQEQSSTEAIKQAEEIRKTEESVKTEQVDEKESPLISNKLITENTLKEMGCREKSRISITAKAIVTPMANDYIRMMKIQVIRV

SEQ ID NO: 787 - DNA, 822 bp, Alkaliphilus metalliredigens QYMF
gtggatttcacacaagtaaatgatctggtgagccaagttgaaaaatcgattcatgagacttttccctttgatagaagcaaggagctattggtaggggttgatttaggaacagcatatgttgtgattgtggtactagatcaacagaataatccaattgcctgtgaaatggaatttgctcaggtggtaagggatggtctagtggtggactatataggagccactcaaattgtacggaaacttaaggaaaagctagagaagaggcttggacagtctttgctgaaagcagccattgccttgccaccggggacggggtcaaaggatagtagaacccataactatgtggtggagggggcagggctagaggttgtgtctgttgtagatgagcccactgctgctaataatgttcttcaagtaaaaaatggcgtgattgttgatattggtggggggacgacgggtttatccattattaaaaatgatgaggttatccatactgtggatgaagccacagggggaactcatcttagtctggtcctagcgggcaattaccgtgtgaagtttgaagaggcggagaaaatcaaaaaagatccaacacggaaaaaagaagtattagccattgtaaggcctgtaattcaaaaaatggcatcgattattcaaaacaatatagtggattatgatgtagagacaatttatttagtagggggaacctgttgcttagacggctttgaagatgtagttgaaaaagagacgggaatttccacccaaaaaccacataacccttttttggtgacccccttagggattgctatgaattgtagagaatag

SEQ ID NO: 788 - protein, 273 aa, Alkaliphilus metalliredigens QYMF
MDFTQVNDLVSQVEKSIHETFPFDRSKELLVGVDLGTAYVVIVVLDQQNNPIACEMEFAQVVRDGLVVDYIGATQIVRKLKEKLEKRLGQSLLKAAIALPPGTGSKDSRTHNYVVEGAGLEVVSVVDEPTAANNVLQVKNGVIVDIGGGTTGLSIIKNDEVIHTVDEATGGTHLSLVLAGNYRVKFEEAEKIKKDPTRKKEVLAIVRPVIQKMASIIQNNIVDYDVETIYLVGGTCCLDGFEDVVEKETGISTQKPHNPFLVTPLGIAMNCRE

SEQ ID NO: 789 - DNA, 639 bp, Alkaliphilus metalliredigens QYMF
atgaaggaagaacagattaagcaaattgtagagcaggttattaagacatttgaagaggctcaatcagtcccaatggaagttccagtggaagtttctgctagacacatccatttgagcaaagaacacatttcgttgctatttggaagcgaagatcaattgagtataataaaagaattgtcccagcccgggcaattccaatatgataaacgagttacattaattggacctaaggggtccattggaaatgttgctattttaggacctagtcgagatgaaacccaagtggaaatatcctatactgatgcgagagccctgggaatcaaaccgccccttagggagtcgggagatttacaggatacagcgggaattattattgcgacgggacataaggccatcaatttagagggaggggtcatgattgccaaacgacacattcatatgacacctaaggatgctgaagtctttcatgtaaaggatggagagcacgtgaaggtgaggattgaaagtaagcggcctattgttttggaggatgtcctggtgagggtcaatgaaaaatacgggttaagtatgcatattgatcatgatgaaggaaatgctgcggcctatcagccgggaaccacagggaaaatgataaaataa

SEQ ID NO: 790 - protein, 212 aa, Alkaliphilus metalliredigens QYMF
MKEEQIKQIVEQVIKTFEEAQSVPMEVPVEVSARHIHLSKEHISLLFGSEDQLSIIKELSQPGQFQYDKRVTLIGPKGSIGNVAILGPSRDETQVEISYTDARALGIKPPLRESGDLQDTAGIIIATGHKAINLEGGVMIAKRHIHMTPKDAEVFHVKDGEHVKVRIESKRPIVLEDVLVRVNEKYGLSMHIDHDEGNAAAYQPGTTGKMIK

SEQ ID NO: 791 - DNA, 774 bp, Alkaliphilus metalliredigens QYMF
atgaaggttttgacagaaaccagtcttcgaatggagttcaaaaacaagtttccaaaaacctattcgatcaattcggggatattagtaacgccttcagcgaagcaatatttaaaggaaaagagaatagagctaatcgtagaagaagaacaggatctagaaaaacaagaggtggtatcaacagacccaaaggaagtaaatcaaaaacaaaaacaacaggtccttcctaaatacaaatgttattttagtggaggattttttgaaagtaagcctgagcatatgacgcagctacatggaaattttctagtcaataaggatcatcctagaattgtactcagagggaagctagacagttttcaggctcagattttagaggtgcaggtaattttaaataatcgcaaggagaaaaagcttctagcagatttatccgaagtactcacatttgttagaagtattttaagagccgaagtgctagaggagccctttaaccaatgtgaaatattgggattaggggaggcggagttaagaaaaatgtcccacaatccagagcagttttttgatgtcaatcattttcttccagattattctatgggaacagtattgataaaattaaattcattgagaagtgctgctagagaagtggagatagtgggggtcaaagcctttactggagccaatggagatataaaaagagtcgatatgattcaagcactgaatcgactcagtagctgtttgtatattatgatgtgccgctggcaaggtgggtactacaagtag

SEQ ID NO: 792 - protein, 257 aa, Alkaliphilus metalliredigens QYMF
MKVLTETSLRMEFKNKFPKTYSINSGILVTPSAKQYLKEKRIELIVEEEQDLEKQEVVSTDPKEVNQKQKQQVLPKYKCYFSGGFFESKPEHMTQLHGNFLVNKDHPRIVLRGKLDSFQAQILEVQVILNNRKEKKLLADLSEVLTFVRSILRAEVLEEPFNQCEILGLGEAELRKMSHNPEQFFDVNHFLPDYSMGTVLIKLNSLRSAAREVEIVGVKAFTGANGDIKRVDMIQALNRLSSCLYIMMCRWQGGYYK

SEQ ID NO: 793 - DNA, 285 bp, Alkaliphilus metalliredigens QYMF
atggcaatttcaaacgcgttaggaatgattgaaacaaaaggattagtaggtgcaattgaggcagcagatgcaatggtgaaggctgcaaatgtaacattattaggtaaagaacatgttggtggtggtttagtcacagtaatggtaagaggagatgttggtgcagttaaagcggcaacagatgctggagccgcagctgcagagagagtgggagaactaatgtctgtacacgtgattccaagacctcatggtgaagtggaaacgattcttccgcaaatcaaagaataa

SEQ ID NO: 794 - protein, 94 aa, Alkaliphilus metalliredigens QYMF
MAISNALGMIETKGLVGAIEAADAMVKAANVTLLGKEHVGGGLVTVMVRGDVGAVKAATDAGAAAAERVGELMSVHVIPRPHGEVETILPQIKE

SEQ ID NO: 795 - DNA, 1452 bp, Alkaliphilus metalliredigens QYMF
ttgcaattacaagataaggatttgttatccatacaagaggtaagagacatggtgtcaaaagccaataaggctcagacggaattctctaagttcagccaagaggccattgatgaaatcgtctatgggatgaagcaagctgcctatagccaagcagaatttcttgggaaatttgcctctgaggaaacagggtttggaaaatggcaggacaagaaaacaaaaaatgaaattgccagtgaaggtgtatataatcatattcaaaacatgaaaaccattggtgtgatacatgaggacgctgaaaagaagattgttgaaattggaacaccggtggggacgattgcagcattgattccctctacgaatccaacttccactgtcatctataaagcacttattgctttaaaatctggtaatgccattattttcagtccacatccaagtggattgaaaagtattttgaagacagtagagattttaaataaagctgctgtagaggcgggagcaccagatggtttactccattgcatgaccctgccaagcatggagggaactagcgagctgatgaagcatagtggtgtggatttgattttagccactggaggttcggccatggtgaaggctgcctatagctctggaacaccagccctaggagttggacctggtaatgttcctgtatttattgaaagaagtgctgatataaaagaagcaatagggaaaatattttccagtaagacctttgacaatggaactgtatgtgcatcggagcaagccattgtcacagaaagatgcattagtgaaaaggtgaaggaagaagtaaaacgccaaggtgggtactttctagttggagagcagctggaaaaggtaaccgcaatcatggagactgtcacagggggaatgaatcctaaaattgtaggaaggtctgcccaagatattgcaacaattgcaggaattgaaattccaaaggagacaaaaatacttctctgtgaagaacaaaatgttgggaagaatgttcctttttctaaggaaaagctgactgcccttttagggttctatacagtggaagattggcagaaaggctgtgagctttgctacgccctattagaaaatgggggcctaggacataccctggccattcattctcaggatgaatccattattagggagtttgctcttaaaaagccagtttctagaatcctagtcaacaccccatcaacccaaggtgccattgggcttagcacgaacctagcaccatcctttaccttaggctgtggagctattggtggaagtgctacatcagataatgtgggaccgatgaacttgatcaatatccgaagaatggcctatggaatagacgattgtagagaaagagaaacccaagattcaaaagaattaagtagtatagatattgaagtaattacccaattagtaatggaaagtttaaaaaataaaatataa

SEQ ID NO: 796 - protein, 483 aa, Alkaliphilus metalliredigens QYMF
MQLQDKDLLSIQEVRDMVSKANKAQTEFSKFSQEAIDEIVYGMKQAAYSQAEFLGKFASEETGFGKWQDKKTKNEIASEGVYNHIQNMKTIGVIHEDAEKKIVEIGTPVGTIAALIPSTNPTSTVIYKALIALKSGNAIIFSPHPSGLKSILKTVEILNKAAVEAGAPDGLLHCMTLPSMEGTSELMKHSGVDLILATGGSAMVKAAYSSGTPALGVGPGNVPVFIERSADIKEAIGKIFSSKTFDNGTVCASEQAIVTERCISEKVKEEVKRQGGYFLVGEQLEKVTAIMETVTGGMNPKIVGRSAQDIATIAGIEIPKETKILLCEEQNVGKNVPFSKEKLTALLGFYTVEDWQKGCELCYALLENGGLGHTLAIHSQDESIIREFALKKPVSRILVNTPSTQGAIGLSTNLAPSFTLGCGAIGGSATSDNVGPMNLINIRRMAYGIDDCRERETQDSKELSSIDIEVITQLVMESLKNKI

SEQ ID NO: 797 - DNA, 621 bp, Alkaliphilus metalliredigens QYMF
atgagtaacaacgcattgggacttttagaaacctacggctacactccgtcaattgtagcactggacgctgccttgaagacagcaaatgtgacattgaaggactttcaaatcactggtggtgggctggtgaccatgatggtggagggagatgtggcagctgttcaagcggctattgaagctggaaacatagcggcagaaaccataggccgtgtgatttcccagcatgtgatcccgaggcctgatatcgggttgaagtctttactacaaagccatgagggaaaaaataaacagccagtagagggacctgtctccatcagcctagatgaggaatctcaggagttggaggaaaaggaagccactcaggagctggaggaagcgccatctcagaaattagaggaagtagaaatacaaaacaagagtgaaaatccagggaatcaccataatggaaaagagatcaaaataaggtctaaaaaagatctcaatagaatgaaggtagtagagctgagaaagatggctaggggattagatggtttttccatggaagcaaaaaccatcaaatttgctaataaatcagagttggtagccgctctattaagtcattttagaatggaggtagaataa

SEQ ID NO: 798 - protein, 206 aa, Alkaliphilus metalliredigens QYMF
MSNNALGLLETYGYTPSIVALDAALKTANVTLKDFQITGGGLVTMMVEGDVAAVQAAIEAGNIAAETIGRVISQHVIPRPDIGLKSLLQSHEGKNKQPVEGPVSISLDEESQELEEKEATQELEEAPSQKLEEVEIQNKSENPGNHHNGKEIKIRSKKDLNRMKVVELRKMARGLDGFSMEAKTIKFANKSELVAALLSHFRMEVE

SEQ ID NO: 799 - DNA, 654 bp, Alkaliphilus metalliredigens QYMF
atgaaaaatgatgcattacgtgcctcggtcctgagtgcaaaaatcatttccaatgcaagtcctgatatgataaaggaactaaagctagagccgggacataggagtattggaatccttacagctgatagtgacgatgtgctttatacagctctggatgaagccacgaaaaaagcagatattaaagtggcttatgcaaagtccttttatgggggggcggccaatgccaataccaagttggcaggagaggtcattggcatcatctctggaccgaatcccgctgaagtaagaagtggattggatgctgtaatcgattttgctgaaaataatgcttgcttttatagtgcaaatgaggatgattccattgcctattatgcccattgtatctctagaacaggatcttatttatccgaggttgcaggaatcaaagagggtgaagccatagcctatgtgatcgctcctcccatggaagcaatatatgccctagatgctgccatgaaagcagcggatgttgaaatggtatgtttctatggacctccttctgaaaccaattttggtgggggattattgactggaagccaatctgcatgtaaagctgcatgcgatgcttttgctgaagctgttaagtttgtggcggataatcctacaaaatattaa

SEQ ID NO: 800 - protein, 217 aa, Alkaliphilus metalliredigens QYMF
MKNDALRASVLSAKIISNASPDMIKELKLEPGHRSIGILTADSDDVLYTALDEATKKADIKVAYAKSFYGGAANANTKLAGEVIGIISGPNPAEVRSGLDAVIDFAENNACFYSANEDDSIAYYAHCISRTGSYLSEVAGIKEGEAIAYVIAPPMEAIYALDAAMKAADVEMVCFYGPPSETNFGGGLLTGSQSACKAACDAFAEAVKFVADNPTKY

SEQ ID NO: 801 - DNA, 900 bp, Alkaliphilus metalliredigens QYMF
ttgatttcagaacaagcagttaaagaaatggttcagcagatagttgaacaaatgaccataggtcaaaagcagactactgaagacaagtatacccaagaaacagatggaaaggaacaaccagaaatatgtatagaggataagaacctaaaggatttaactgaaattaagatgcaggattattttgcagtacccaatccagaaaataaggaagtctatttaggacttaaggaacagactcctgccagggttggtatttggagaaccgggtctcgtaattctacagagacattgttgcggtttcgggcagatcatgcggttgccatggacgccgttttcacctatgtttctgaagaacttttagaagaagtgggattgttttcagtgaacaccctatgccgtaataaggatgaatatatgacaagacctgatttaggcagaaaatttagtcaagaaaccattgaaatgattaaggaaaagtgtgtgaaaagtccacaagtacaaatttacgtttctgatggtttgagctccacagccattgaggccaatattaaggatattctaccttctattatgcaaggattagagaatgagggactcaaggtaggaaccccattttttgtgaaacatggtagggtaccagccatggatgtgatctcagaaacccttgatgctggagcaaccgtggtgttaattggtgaaagaccagggttggctacgggagaaagcatgagctgttatatgacctatggtggaactgtagggatgcctgagtccagaagaacagtgatatccaatattcataggggaggcacaccagccactgaagcaggtgcccatattgcacaaattgtcaaggaaatgataaaccaaaaagcaagtggattagatctcaagctataa

SEQ ID NO: 802 - protein, 299 aa, Alkaliphilus metalliredigens QYMF
MISEQAVKEMVQQIVEQMTIGQKQTTEDKYTQETDGKEQPEICIEDKNLKDLTEIKMQDYFAVPNPENKEVYLGLKEQTPARVGIWRTGSRNSTETLLRFRADHAVAMDAVFTYVSEELLEEVGLFSVNTLCRNKDEYMTRPDLGRKFSQETIEMIKEKCVKSPQVQIYVSDGLSSTAIEANIKDILPSIMQGLENEGLKVGTPFFVKHGRVPAMDVISETLDAGATVVLIGERPGLATGESMSCYMTYGGTVGMPESRRTVISNIHRGGTPATEAGAHIAQIVKEMINQKASGLDLKL

SEQ ID NO: 803 - DNA, 1368 bp, Alkaliphilus metalliredigens QYMF
atgatactaaaatcaaagttatttggtacggtttatcagtttaaaagtttaaatgaagtgatggctaaagccaatgaggaaaggtcaggggataaactggcgggtctggcagctgaatctgttacagaaatggtagcagccaaggaagtattgagtaatatcacactaaaggacatcagaaacaatcccgctgttccttacgaaacagatgaggtgaccagagttatccaagacggtgtcaatgaaaagatttataaggagattcaaaactggacggtttctgagcttagggaatggattttaagcaatgaaaccaccggtagtgacatcaaaaggataggtagggggctcaccagtgaaatggtggcagcggtaactaaattgatgtccaatttagacttggtatatggtgctaaaaaaatcattgtgacggcccattgcaatacaaccattggagaatcagggacattggcctatagacttcagcctaatcatacaaccgacaacatagaaggaatcaaggtatctctttatgagggattaagctatggggtaggagatgcagtattgggattgaaccccgtaaatgacacggttaacagtgttaaaaatgtattgaatttgtttgaagaagtcaagcaaaaatggcaaattccaacccaaacctgtgtgctggctcatatcacaacacagatggaagccattagacagggagcaccttcggatatgatcttccaaagtatagcaggaactgaaaaaggtaatgaagcctttggtttaaatgacagtcttttatctgaagctcgagagcttgtactaaaagaaggaacctctacggggcctaatgtgatgtactttgaaacaggtcaaggctctgagctttcttcagatgcccacatgggagtagaccaagtcacactagaagctagatgctacgggttggctaaaaaacacagtcccttcttggtgaatacagttgttggatttattgggcctgagtatttgtacaatagcaaacaagtgatgcgtgcagggctggaggatcactttatgggtaagctgtcggggattccaatgggggtagatgtatgttataccaaccatatgaaggctgatcaaaatgacattgaaaacttaagtgtcctattagccagcgctggatgtaatttcttgatcggaacacccgcaggagatgacattatgcttaactatcaaagctcaagcttccatgatgccgctaccttaagagagctattgaatctaacaccaattcctgaatttcagaagtggttagaaaaaatgggaatctctgaaaatggcaggttatcaaagcgagcaggagatgcatctattttttttagtaaataa

SEQ ID NO: 804 - protein, 455 aa, Alkaliphilus metalliredigens QYMF
MILKSKLFGTVYQFKSLNEVMAKANEERSGDKLAGLAAESVTEMVAAKEVLSNITLKDIRNNPAVPYETDEVTRVIQDGVNEKIYKEIQNWTVSELREWILSNETTGSDIKRIGRGLTSEMVAAVTKLMSNLDLVYGAKKIIVTAHCNTTIGESGTLAYRLQPNHTTDNIEGIKVSLYEGLSYGVGDAVLGLNPVNDTVNSVKNVLNLFEEVKQKWQIPTQTCVLAHITTQMEAIRQGAPSDMIFQSIAGTEKGNEAFGLNDSLLSEARELVLKEGTSTGPNVMYFETGQGSELSSDAHMGVDQVTLEARCYGLAKKHSPFLVNTVVGFIGPEYLYNSKQVMRAGLEDHFMGKLSGIPMGVDVCYTNHMKADQNDIENLSVLLASAGCNFLIGTPAGDDIMLNYQSSSFHDAATLRELLNLTPIPEFQKWLEKMGISENGRLSKRAGDASIFFSK

SEQ ID NO: 805 - DNA, 1434 bp, Alkaliphilus metalliredigens QYMF
ttgacggaagaggtttttagtgtagggattgatattggtacctcaacaactcaattagtatttagtaaactgaccattgaaaacaccgcttcaatgatggcgattccgaaaatacaaatcattgacaaagaggtcgtttacagaagtgacatacattttactcccttgctatcggatacaagaattgatggagatgccattagaaggattattgaattagaatataaaaaagcaaatatttcctttgaaaaaatagatacaggggcggttattatcactggagaaactgcccggaaggaaaatgccaatgaaatcctcagcacccttagtgggctggccggtgactttgttgttgccactgcaggaccagatctggaaagcattattgcgggtaagggggctggggcaggaaagttctctaaggagaaaggatgtactgttgccaacctggatgttggtggcggcacaactaatatcgctattttcaaaaatggagaagtaattgacactgcttgtcttgatattggaggtagactgattaagtttgccaatgatcaactgaaagtaagctatgcttctggtaaaattaaagttttagccaaagagataggcatcgatgttgaagtaggcaacaaattgtcagtagaggaagtagaacgaatcagtagaagaatgggggaggttttagccgagagcatagggctgatccctgaaacaactcttctacagaagatgctaacgggaacctccctaaagcggcagggagaaattgattgtatttccttttccgggggcgtggcagattgcatctttaacaaagagattgctcccccctttaaatatggtgacatcggtattgttcttggtaaatccattgcatcttccccttggttagaaactgctaaggtgattcaagccagtgaaaccattggggcaacagttgttggtgcaggaacccatacaacagagatcagtggcagtaccattaccattgaagcatcgattttacctatgaaaaacatccccattttaaggttaaatcaggaggatgaagagctggtctatgatcaactaagtcatcgtatcgctgaaaagctagattggtttcgtctggaaaatggacaacagctggtggccttagccatgagggggttgaagaatccaagctttaaagagatacaaggattggcaaaggccattataaaagggatggaaaataagctaggggaaaagcaaccactgatcattgtggtggaacaggacatgggaaaaatattagggcaaggaatccatgctcacctagctgggaaaagggatgtgatctgcattgattcgattaaagttgacaatggggattacattgacattgggaagcctttggccaatgggaaggtagtgcctgttattgtcaaaaccttggtgtttaattattag

SEQ ID NO: 806 - protein, 477 aa, Alkaliphilus metalliredigens QYMF
MTEEVFSVGIDIGTSTTQLVFSKLTIENTASMMAIPKIQIIDKEVVYRSDIHFTPLLSDTRIDGDAIRRIIELEYKKANISFEKIDTGAVIITGETARKENANEILSTLSGLAGDFVVATAGPDLESIIAGKGAGAGKFSKEKGCTVANLDVGGGTTNIAIFKNGEVIDTACLDIGGRLIKFANDQLKVSYASGKIKVLAKEIGIDVEVGNKLSVEEVERISRRMGEVLAESIGLIPETTLLQKMLTGTSLKRQGEIDCISFSGGVADCIFNKEIAPPFKYGDIGIVLGKSIASSPWLETAKVIQASETIGATVVGAGTHTTEISGSTITIEASILPMKNIPILRLNQEDEELVYDQLSHRIAEKLDWFRLENGQQLVALAMRGLKNPSFKEIQGLAKAIIKGMENKLGEKQPLIIVVEQDMGKILGQGIHAHLAGKRDVICIDSIKVDNGDYIDIGKPLANGKVVPVIVKTLVFNY

SEQ ID NO: 807 - DNA, 1410 bp, Alkaliphilus metalliredigens QYMF
atgttacaggagctttgtaagacctatacgcaattatccgactcagatattcttattttagaaaatgcaaagcagatgttgccacttatttctagtgccattagagctgatgtgtttatcgattgtctaacgaatatacccaatacagctattgttgtggcagaagctaagcaaagtcaaaaagaatccatgtaccagcattcagtagttggcaaatttgctctgggagagaacgaacccgctgcattgcgcacgttagagactggtcttgcttctcgggatttaaaggcgttgacccaggaaaacaaaacggttagacaaagtgtagagcctataagaaataaagaagaccagatgataggcgttttgattatagagcaggatattacaaaggacattaagagggacaaagagatggaaaacttattgcaaacagcggaaaaactaacggaaacagtgagtaccctgaagggtgctgaaagcacaattattcatcatgttaatgaagcgattattatgttcaatcgtaatggcattgcgacgtattgtaatccggaggctcatcagctttataagaagctgggatatcaagatgaaattgttggattatcctttaacaacttaactttgggtgggatgactttctctggcgtcattcataaagacttggttaatgtagtggaagtcaaagtaggaaaactgtcactacgagtgaaatatgtagccatggaagatgagaatgaagtgattggattcattatgatcatcaatgatgtcacagaggtaaaggaaaaagaaatggaattggtttcgaaatcagttgtcattagtgaaatacatcatcgtgttaagaataatctacagaccattgccagtttgttgagattacagtcacggcggatccatgaggtcaaagcaaagcaagccttcaatgaaagtattagtcggattttaagtattgccatcacccatgagttgttagcccaaaggggtgtagatgatgttgatttacgaaccatactagagagaataaaggaaagtaccatggattatgtcatatctccagataaaatgatcagtatttccatagaaggagatcatatcattgttaactcagataaggcgacatccattgccctagttgtgaatgagcttttgcaaaatgcactagaacacggattcaaaggaaggcaagagggaaagataagaattcatattcgaaaaagtgatatctacactgatgtgactgttgtggatagtggcctggggtttgatgcggagaaggttaaaacaaaaagtctaggattaagcattgtcaagagtattgttagagaacgactttatggtaatctgcaaatgaattcttctaatcagggaacggaaatacggtttaatttcaaaaataaataa

SEQ ID NO: 808 - protein, 469 aa, Alkaliphilus metalliredigens QYMF
MLQELCKTYTQLSDSDILILENAKQMLPLISSAIRADVFIDCLTNIPNTAIVVAEAKQSQKESMYQHSVVGKFALGENEPAALRTLETGLASRDLKALTQENKTVRQSVEPIRNKEDQMIGVLIIEQDITKDIKRDKEMENLLQTAEKLTETVSTLKGAESTIIHHVNEAIIMFNRNGIATYCNPEAHQLYKKLGYQDEIVGLSFNNLTLGGMTFSGVIHKDLVNVVEVKVGKLSLRVKYVAMEDENEVIGFIMIINDVTEVKEKEMELVSKSVVISEIHHRVKNNLQTIASLLRLQSRRIHEVKAKQAFNESISRILSIAITHELLAQRGVDDVDLRTILERIKESTMDYVISPDKMISISIEGDHIIVNSDKATSIALVVNELLQNALEHGFKGRQEGKIRIHIRKSDIYTDVTVVDSGLGFDAEKVKTKSLGLSIVKSIVRERLYGNLQMNSSNQGTEIRFNFKNK

SEQ ID NO: 809 - DNA, 570 bp, Alkaliphilus metalliredigens QYMF
atgaaaggtcgagtggtaatagccgatgacgaacctattactagaatggacatagtagaaatgctacttgaggaaggatatgacattgtaggcgaagcttcggatggatttgatgcaattgagttgtgcaaaaaacataaaccagatttggtattaatggatgttaagatgcctctactaaatggattgaaggccgctgaggtgattaaccaagatgaactagcagcatgtgttgtattggtaacggcctatagcggaagagaatttgtagaagaggctaaaaaagcaggtgccatgggttatgttgtgaaaccaattaatgagaagaacctactcccgaccttggaggttgcggtatctaaaagcaaagaatttaatgagatgaaaagccaagtcaaaaaagcacaggttcaattagaggatagaaagcaaattgagagggccaagggaattctgatgaaaaaagaaatgctttcagaagaagaagcctacaaccagataagaaaactgagtatgtccaaaagatgttctatgggtgaaatagcaaaaatcattacgatgaatcaataa

SEQ ID NO: 810 - protein, 189 aa, Alkaliphilus metalliredigens QYMF
MKGRVVIADDEPITRMDIVEMLLEEGYDIVGEASDGFDAIELCKKHKPDLVLMDVKMPLLNGLKAAEVINQDELAACVVLVTAYSGREFVEEAKKAGAMGYVVKPINEKNLLPTLEVAVSKSKEFNEMKSQVKKAQVQLEDRKQIERAKGILMKKEMLSEEEAYNQIRKLSMSKRCSMGEIAKIITMNQ

SEQ ID NO: 811 - DNA, 429 bp, Alkaliphilus metalliredigens QYMF
atgaagaaagttattttagtaggtagaacgggtagtggaaaaacctccctcagccagagactcaaccaacaagaactgatttataagaagacccaagcaatggaattttctgacagggtattagatacgcctggagaatatattgaaaacagaaggttttactatgcaattatcagtgcttccgctgattgtgatgtcataggcatcctacaagccattgatgaacccaattgcatttttccccctggttttggaaacttttttaacaaacctgttataggcattatcactaaaatagatctagagcatgatagtggcaatgtggaaagcgacttatatgctgcaggagctcagcaaatttttagaataagtgctgttactggagaagggttagaggagcttagagtttatatggaagaagtagactga

SEQ ID NO: 812 - protein, 142 aa, Alkaliphilus metalliredigens QYMF
MKKVILVGRTGSGKTSLSQRLNQQELIYKKTQAMEFSDRVLDTPGEYIENRRFYYAIISASADCDVIGILQAIDEPNCIFPPGFGNFFNKPVIGIITKIDLEHDSGNVESDLYAAGAQQIFRISAVTGEGLEELRVYMEEVD

SEQ ID NO: 813 - DNA, 351 bp, Alkaliphilus metalliredigens QYMF
atggccacagaagaaaaacaaaggatggttcaagagtatgtaccaggaaaacaagttacattagctcatttaattgcgcatcctcaacacagcatttataaaaaacttggactaatagaagatgaatacaatgccatcggaattttgaccataactcctggtgaagctgccattattgctgctgatgtggcgactaagtccgccagcgttgaaatcggtttcttagaccgttttagtggttctttggtcatcacaggagatgttgctagtgtagaatcggctttgcttggggtgatagagagtttgaccaacacactgcaatttactccggcagaattaactcgatcctag

SEQ ID NO: 814 - protein, 116 aa, Alkaliphilus metalliredigens QYMF
MATEEKQRMVQEYVPGKQVTLAHLIAHPQHSIYKKLGLIEDEYNAIGILTITPGEAAIIAADVATKSASVEIGFLDRFSGSLVITGDVASVESALLGVIESLTNTLQFTPAELTRS

SEQ ID NO: 815 - DNA, 300 bp, Alkaliphilus metalliredigens QYMF
atgaagtatgatgcattaggaatgattgaaacaaaagggttagtgggatcaattgaggcggcagacgctatggtaaaggcggcaaatgtgagtttagtaggaaaagagcaaattggtgcaggtttagtaactgttatggtgaggggcgatgtaggtgctgtgaaggcagcaacagatgcaggtgcatcagcggctaaaagagttggtgagttgatttctgtacacgtaattccgcgtcctcatggagaagtagaaacaattcttcctatgaaaaaggcatctaaagaagttatgaaataa

SEQ ID NO: 816 - protein, 99 aa, Alkaliphilus metalliredigens QYMF
MKYDALGMIETKGLVGSIEAADAMVKAANVSLVGKEQIGAGLVTVMVRGDVGAVKAATDAGASAAKRVGELISVHVIPRPHGEVETILPMKKASKEVMK

SEQ ID NO: 817 - DNA, 741 bp, Alkaliphilus metalliredigens QYMF
atgaatgtcgttatgatcgctgaagacgaaaccttagaacaagaattccttaagtccattatcgctgatgcattacacccagaagattttttacttacctgcgagagtggagtggaagctatagagttatctaaaaagcaccgccctaacatcatcatcatggatttaatgttggcagaattagatggtttaagtgctattgaagaaataagaaattttttgcctgaaagctgcatagctatcatttcagcctattccgatttttcttatgcccaaagagccattcgtcttaatgtccatgaatatctattgaagcccattaaacccgctaaaattaaaagtattcttaacaaaatgcttgaaactccaagagattgtgactcctttgataaacccccagcagtaaataacgatgaatataagcattttatcaaagattctattgcctatattaatgagcattttaaagaaaagctcacgttagaaatggttgcatcaaaaatctatatgaatcccaagtattttagtcaaaccttcaaaaaagaagtgaggatttcttttactgagtatgtggtaaaactaagaatggaatttgcttgcaaactgttagcgaccaccaattatccagtttatcgtattgctaccgaatgtggtttttctgacccttcatattttaatcgagtattttgttctcatatggatatgacacctaaggcttaccgcaaaaaaatgaatcaatag

SEQ ID NO: 818 - protein, 246 aa, Alkaliphilus metalliredigens QYMF
MNVVMIAEDETLEQEFLKSIIADALHPEDFLLTCESGVEAIELSKKHRPNIIIMDLMLAELDGLSAIEEIRNFLPESCIAIISAYSDFSYAQRAIRLNVHEYLLKPIKPAKIKSILNKMLETPRDCDSFDKPPAVNNDEYKHFIKDSIAYINEHFKEKLTLEMVASKIYMNPKYFSQTFKKEVRISFTEYVVKLRMEFACKLLATTNYPVYRIATECGFSDPSYFNRVFCSHMDMTPKAYRKKMNQ

SEQ ID NO: 819 - DNA, 1194 bp, Alkaliphilus metalliredigens QYMF
atgatatctgaaaataatgctatgaaaaagatgatagtttcaaactttcataaccgctatagcggaattctctcgttatccgatatttctcttttcttggtggatcgaaatggcgaaattttgcatgagtttatttcctcccctgatttctgcacgaatctctgtaaagaaagtagtcaatcagtttgctctgactatagaaaacaaataaaaaatcgtcattataataattttttttgtaaatatggtttaaataacattattcttcctatcgaagtggataatgaaatcatgggttttatcgggggcatgcaagtatatttaaaggagaatgaatacaaaaaatacatggttaatgcccagtcttttacaaaggaaaacgatgtaaagttagaattcattgctaaagccatcggctcattaaaaaccgtagaaagcaataaaattgtcgtccatgagcaactctgtcatcatatcgctaaaaacatcgcattagaccttaaggataccatcaatgaaaaaaagcctcatgtttctaccctatcgatcgaaaaagaaatgctagaaaaaaagatcatcgaccttgaagtaaaaaatatgtctttggtggtcaatcctcattttgtattcaacacgttaaatagtattgcaagaatcgcctactttgaaaaatctcatacgatcgaagaacttatttattgtctttcagatctattgcgctacaatttaaaccaaggagatcaacttcatacggtagcagcagaaattgacaatattgaaaaatatttgcatattcaaaaagtacgttttaggagccgtctcgattacgtcattgatgtgcctgatcaagttcagtctatgagaataccaaacatgatcatacaaccaattgttgataatgctattaatcatgggattacgggcaatcgcgatggaggtatagtaaaaatctatgcagaaagtatgaaaaacactttgataatttttgttgctgataatgggaacgggtttcctcaagaagtctataacaaaattcatcgtggagattgtccttctggttatggtttctcaagtactgataaacgtttaaagcaatattatggcaatgcctatggcttgaaaattgtcaaatcagattttagtggtagtactgtttctattaccattcctaagaaacatcctggaggtgtttaa

SEQ ID NO: 820 - protein, 397 aa, Alkaliphilus metalliredigens QYMF
MISENNAMKKMIVSNFHNRYSGILSLSDISLFLVDRNGEILHEFISSPDFCTNLCKESSQSVCSDYRKQIKNRHYNNFFCKYGLNNIILPIEVDNEIMGFIGGMQVYLKENEYKKYMVNAQSFTKENDVKLEFIAKAIGSLKTVESNKIVVHEQLCHHIAKNIALDLKDTINEKKPHVSTLSIEKEMLEKKIIDLEVKNMSLVVNPHFVFNTLNSIARIAYFEKSHTIEELIYCLSDLLRYNLNQGDQLHTVAAEIDNIEKYLHIQKVRFRSRLDYVIDVPDQVQSMRIPNMIIQPIVDNAINHGITGNRDGGIVKIYAESMKNTLIIFVADNGNGFPQEVYNKIHRGDCPSGYGFSSTDKRLKQYYGNAYGLKIVKSDFSGSTVSITIPKKHPGGV

SEQ ID NO: 821 - DNA, 1155 bp, Alkaliphilus metalliredigens QYMF
atgaatcaattcaaaatagattctatgatttactttaatgatgacgaatcagaatcattagaatttctaaaaggtattaagggagaaaaagctttcattgttgcagattccatcatggacaagctaggctacttagaaaaaacaatttcacatcttaagcatgctaaaattacttgctcagttttcactggagtaaaacccgatccagacacgagtacaattagtaatggaattaaagagtacaaaaaaacagatgccgatatcattatcgcattgggaggaggttctgctattgatacggcaaaggcaattatttattattctgctaaattatctgataaccacttgtcaaaacataagcctctttttattgcaattccttctaccagtggaaccggttcagaagttactgatttctctgtaattacctccgatggacaaaagatttgtattattgatgatcttatcgttcctgatattgcattgcttgatgcaacgtgcattcaacatgttccaaaaaatgttgtggctgatacaggaatcgatgttctagttcacgccatcgaagcttacatctctacaaaagcaacagactttaccgacgccctagctgagaaatccattaaaattatttttgaagatttagaaacggtatacttagatattcataatacagctgcaagaagacgaattttaaatgcttcctgtattgctggtatggcattttctaatacaggtcttggaataaatcacagtttagcccatgccttgggctcagctttcaacatctcccatggaagagcaaacgcattagttttacaagaagttatgagatataacggtgatttagatggtaaagctaacaatactgctgctcataaattttctaatttagccaagcaactatatcttccagcaagaaccgttagagaaggtgcttatcattttattgctgccgtaaaggagcttcaatcttctataaatatagaaagagatctcaaatcatttggtattgatgaattagatttaaatgcgcaaatctcttacttagctgaaaatgctctgaatgatcggtgcacaccaacgaatcctagaaaagtcacaattgaagatttagtaaggatttatcgtaattgctatgagttatcgttttaa

SEQ ID NO: 822 - protein, 384 aa, Alkaliphilus metalliredigens QYMF
MNQFKIDSMIYFNDDESESLEFLKGIKGEKAFIVADSIMDKLGYLEKTISHLKHAKITCSVFTGVKPDPDTSTISNGIKEYKKTDADIIIALGGGSAIDTAKAIIYYSAKLSDNHLSKHKPLFIAIPSTSGTGSEVTDFSVITSDGQKICIIDDLIVPDIALLDATCIQHVPKNVVADTGIDVLVHAIEAYISTKATDFTDALAEKSIKIIFEDLETVYLDIHNTAARRRILNASCIAGMAFSNTGLGINHSLAHALGSAFNISHGRANALVLQEVMRYNGDLDGKANNTAAHKFSNLAKQLYLPARTVREGAYHFIAAVKELQSSINIERDLKSFGIDELDLNAQISYLAENALNDRCTPTNPRKVTIEDLVRIYRNCYELSF

SEQ ID NO: 823 - DNA, 918 bp, Alkaliphilus metalliredigens QYMF
atgagcatagaggctgtagtagaaaaaaaattacaaacttatttccaagatgattcaatcgaatttgataaatcacgatttgctggaggattaacaaattacaactatatcatgcaaattaaaggaacggagtatgtgattcgtcaaccgggagggatgacgaataaaatgattgatcgaaaagtggaaaaagaaaataatcgtattgcttctcaaatgggaattaattcagaatgtgtatattttgatgaagaaagtggaacaaagtttagtaagtacatcccaaacagtgaaaatattgcaaacttgaacccaaactccccccaaaatatagaagcagtatctgaaattatgaggaaaattcatcaaagtaaatacactttttccaatgaattcgactttaagtctgagttagataagtacgaatcactggtagaagagttaaatggtagctttttctttgattatttggagcataaagaacaattatttgaatacatggaaaatcatctgactgaaatgaactttctaccatgtcataatgatacggttcctgaaaattttattatggacaaagatggggtggcttatcttgttgactgggagtattctggcatgaatgatccaaactgggatattgctgcatatatactagaatcaagactaacccaagaaggcgtcgaaaacctttataaaagctattatcaaagagtgccaaatgataaagaattagggaatatcaaatgttatattcttgctcaagatctactgtggacggtttgggctttaattcgacattacaatggagatgactttctccaatattgctatatgagatatgaacgctttaaaaagaacataagggaaatgaacaatgaagcagaataccccatagcaactatggctgattataattag

SEQ ID NO: 824 - protein, 305 aa, Alkaliphilus metalliredigens QYMF
MSIEAVVEKKLQTYFQDDSIEFDKSRFAGGLTNYNYIMQIKGTEYVIRQPGGMTNKMIDRKVEKENNRIASQMGINSECVYFDEESGTKFSKYIPNSENIANLNPNSPQNIEAVSEIMRKIHQSKYTFSNEFDFKSELDKYESLVEELNGSFFFDYLEHKEQLFEYMENHLTEMNFLPCHNDTVPENFIMDKDGVAYLVDWEYSGMNDPNWDIAAYILESRLTQEGVENLYKSYYQRVPNDKELGNIKCYILAQDLLWTVWALIRHYNGDDFLQYCYMRYERFKKNIREMNNEAEYPIATMADYN

SEQ ID NO: 825 - DNA, 1134 bp, Alkaliphilus metalliredigens QYMF
atgagtcaagcagaaaatgtggcaaatccgtcttacgtaaaaaactcaaatgtatcagcacggatagctaaaaaggaattgtcagcaaaattttttaaaaaaggaattaccataggcttgttatcggggttaacctatgggatgttcgcagcttttattactctagggatgtctaggggggtctgggcagactggtatggggcaaacagtactgggctttcagcttttacggtagtatttattttgggagctttaggaacagcagtgaacgacatttgtagtgcgatatgggcattattaaacaacggcattaaagggaaattaggagatttttttagaacgataaatacaaaaccaggaagaatgattatggttgctgcattgcttggtggaccgattgccaatgtagcgtatattgttgcgattcaattagcgggttccattgcgattcccatcactgccctttgtcctgctattggagcaatattaggaagagtattatacaagcaagaattaaataaaaggatgtccgtgggagtattaatctgtgtaacggctagtattatcattggaagtattggtattggaggagatgctgctgatagcgttggattaggtttaatcgtggctttggtggcagccttaggatggggatttgaaggagtgctggctggatatggatcagctatggtggattctgaaattagtatcactgttagacaagttacttctggattagcaaatattttcatcttattaccgattttagggttcattgctggaggaatttctattccctttgagcttgcaggacaagcatttactagtggttcagccatgatttggtttgcagtatccgggttctttgccttcatttcatttatgtggtggtacaaaggaaatagtatgacgggagctgctttaggaatggcaactaatggaacttactcattctttggtccactttgttgctggatattattgggtgtgattattggagaaccaggttggagtttaactgcattagaatggtttgcagcgatcatgatggcttttggaatcttagtaattgctatgaatccaatggatttattccataaagacaaggaggaaataatcgatgaaaccgcttaa

SEQ ID NO: 826 - protein, 377 aa, Alkaliphilus metalliredigens QYMF
MSQAENVANPSYVKNSNVSARIAKKELSAKFFKKGITIGLLSGLTYGMFAAFITLGMSRGVWADWYGANSTGLSAFTVVFILGALGTAVNDICSAIWALLNNGIKGKLGDFFRTINTKPGRMIMVAALLGGPIANVAYIVAIQLAGSIAIPITALCPAIGAILGRVLYKQELNKRMSVGVLICVTASIIIGSIGIGGDAADSVGLGLIVALVAALGWGFEGVLAGYGSAMVDSEISITVRQVTSGLANIFILLPILGFIAGGISIPFELAGQAFTSGSAMIWFAVSGFFAFISFMWWYKGNSMTGAALGMATNGTYSFFGPLCCWILLGVIIGEPGWSLTALEWFAAIMMAFGILVIAMNPMDLFHKDKEEIIDETA

SEQ ID NO: 827 - DNA, 267 bp, Alkaliphilus metalliredigens QYMF
atgaaaccgcttaattacgctattttaaaacattttacaaaggtgaaagaagcttcagctgaagatgtaattgatgcgcttcgaggagaatatggaaaattcaaagctcttaacaaagaggaagtaattaacgcgctaatgacggctgaagccaatggattattagaagaaagcaggtttgagttaaacaacaaaggggagctaagaatttattttcgagcccatgcagaaggagaagaagtaatcaataattttattgaaagctaa

SEQ ID NO: 828 - protein, 88 aa, Alkaliphilus metalliredigens QYMF
MKPLNYAILKHFTKVKEASAEDVIDALRGEYGKFKALNKEEVINALMTAEANGLLEESRFELNNKGELRIYFRAHAEGEEVINNFIES

SEQ ID NO: 829 - DNA, 300 bp, Alkaliphilus metalliredigens QYMF
atgaggtatcacggtgaggaagcactaggtcttatagaaacaattggaatggttcctgcagtagaagcagcagataagatgttgaaggcttcgaatgtagaaattgtagcctatgaaaatatcggttcaacattagttacagtgatgatcaaaggggatgtagcagcagtaaaagctgcagtagaagctggggcgactgctgcttctactatagggaagttaacagcgcaacatgttatgcctagacccatagaaaatataggtcacattgtttctatttatgacattgataataaataa

SEQ ID NO: 830 - protein, 99 aa, Alkaliphilus metalliredigens QYMF
MRYHGEEALGLIETIGMVPAVEAADKMLKASNVEIVAYENIGSTLVTVMIKGDVAAVKAAVEAGATAASTIGKLTAQHVMPRPIENIGHIVSIYDIDNK

SEQ ID NO: 831 - DNA, 303 bp, Alkaliphilus metalliredigens QYMF
atgaataattacaaagccttgggtttaatcgaaacctttgggattgttttcgtactagaagcagcggatgccatgtgtaaagcagcagatgtggatctaattggatttgaaaatgtggcgtcgggttatatttctgttctggttagaggggatgtaggagcttgtaaagctgcagtagaaagtgggataagagcagttaaagaaatggggtctgaggtttatagttctttagtaattcctagtccccatcatgatattgaaaaaatcatttcccgttacagcctagaaacacttaatccataa

SEQ ID NO: 832 - protein, 100 aa, Alkaliphilus metalliredigens QYMF
MNNYKALGLIETFGIVFVLEAADAMCKAADVDLIGFENVASGYISVLVRGDVGACKAAVESGIRAVKEMGSEVYSSLVIPSPHHDIEKIISRYSLETLNP

SEQ ID NO: 833 - DNA, 2538 bp, Alkaliphilus metalliredigens QYMF
ttgaatattcgagaattctcaattaaattcgtagaagccactaaaaatatgtcagaagaagaacgaaatgctttgaagaaaatttttcaaggaatcacacaagaaattccaaaagaagacacagatatttctttatatagagaaaatcatcagggaattcctacgggaattacagaacgattaaaaaccttaaaagacaactacttaaaatggaagccatcgatttccattcaccgagcgcgagccattacaaaaattgcaaaagaaaaccctggaatgccaaaaatattgttaagagctaaaagcttccgttattgttgtgaaacggctcccttagtaattcaagaccatgaactgatcgtcggtgctccatgtggtgctccgcgagcgggggcattttcaccggatatttcatggagatggctagaggaagagttagataccattgccaataggtctcaagatcctttttatatctctgaagaagataaaaaagaattggtagaggagatcttcccttattggaaagggaaatctgtggacgagcacagtgaggatcaatttagggaagcgggtgtttgggaaatttcaggagaatcctttgtatccgactgttcctatcatgcactaaatggtggtggggactccaatccaggatatgatgtgattttaatgaaaaaaggaatgcttgatatccaagaagaagcgaaggaaaagcttaatgagctaagttatgaaaatccagaggatatagaaaaaatatatttttacaagtctgtaatccaaacaactgaaggggttatggtttacgctagaaggttgtcggaatatgctatggaattagcccaaaaagaaagcaatcctaaccgtaaagcggaactgatgaaaattgcggaagtaaacaaaagagttcctgcgcataaaccaaacaacttttgggaagcaattcaatcggtatggacagtagaatccttacttgttgtagaggaaaatcaaacagggatgtccattggaagagtagatcagtacatgcacccattctttgagcaagatcttaaaaatggaaacttaagtgagtatgaagcttttgaattagcgggctccatgttaattaagatgtcagaaatgatgtggttaacaagtgaaggtagttccaagttctttgcgggttatcagccattcattaatatgtgtgtaggtggtgtgacaagagaaggattagatgcaaccaatgatctgacttatctattgatggatgccgttcgacatgtgaagatttatcaaccttcattagcaacaaggatccacagtaaatctcctaaaaaatacttaaggaaaattgtggatgtggttcgatctggaatggggttcccagcttgtcattttgatgatgtacatatcaaaatgatgctggcaaagggggtttccatcgaagatgcaagagattactgtttaatgggctgtgtggaacctcaaaaatcagggcgtttatatcagtggacttcaacggcgtatactcagtggccaatttgtatagagcttgctttaaataaaggaattcctctctggtatggaaagaaagtttgtccagacacaggggatgtagatgggtttgcctcttatgaagattttgaaaaggccgtaaaagagcaaatcaattacattacgaaattaagtagtattgctacagtaattacacaaagagtacaccgagaattagctccaaaacctctgatgtctattatgtacgaaggttgtatggaaaaaggaaaagatgtttcttcaggaggagcgatgtacaactttggtccaggagtggtttggagtggactagctacttatgtagattccatggcggcaattaaaaagctagtatttgatgaaaagaaatacacatttaaacagctaaatgaagcgttaaataaagattttgagggccacgaagagctaagaaatgattgcttaaaagcgcctaaatacggaaacgatgacgactatgctgacttaattgctgtggatttagtcaattatacagaaaatgagcatcgaaagtataaaacgctttactcagtattaagccatggtacactgtctatttcaaataatacaccttttgggcaattaactggagcctctgctaatggcaggaaagcctgggcaccgttgtccgatggaataagtccaactcaaggagctgatttcaaaggacctactgcaaccattaaatccgtttcaaaaatggcttgtgacaatatgaatattggtatggtacacaattttaaacttatgtctggcttgctagatactcctgaaggggaagaaggaattgtaacattacttcgaactgcttctatgctaggggtaggagaaatgcagtttaattacctagacaatgaaacgttaattaaagcacagaaaaatcctgaacaatatcgggacttgatcgtacgagtagctggttatagtgctttctttgtggaactatgcaaagacgttcaagacgagatcataagtcgaaccatgttaacaaaaatttaa

SEQ ID NO: 834 - protein, 845 aa, Alkaliphilus metalliredigens QYMF
MNIREFSIKFVEATKNMSEEERNALKKIFQGITQEIPKEDTDISLYRENHQGIPTGITERLKTLKDNYLKWKPSISIHRARAITKIAKENPGMPKILLRAKSFRYCCETAPLVIQDHELIVGAPCGAPRAGAFSPDISWRWLEEELDTIANRSQDPFYISEEDKKELVEEIFPYWKGKSVDEHSEDQFREAGVWEISGESFVSDCSYHALNGGGDSNPGYDVILMKKGMLDIQEEAKEKLNELSYENPEDIEKIYFYKSVIQTTEGVMVYARRLSEYAMELAQKESNPNRKAELMKIAEVNKRVPAHKPNNFWEAIQSVWTVESLLVVEENQTGMSIGRVDQYMHPFFEQDLKNGNLSEYEAFELAGSMLIKMSEMMWLTSEGSSKFFAGYQPFINMCVGGVTREGLDATNDLTYLLMDAVRHVKIYQPSLATRIHSKSPKKYLRKIVDVVRSGMGFPACHFDDVHIKMMLAKGVSIEDARDYCLMGCVEPQKSGRLYQWTSTAYTQWPICIELALNKGIPLWYGKKVCPDTGDVDGFASYEDFEKAVKEQINYITKLSSIATVITQRVHRELAPKPLMSIMYEGCMEKGKDVSSGGAMYNFGPGVVWSGLATYVDSMAAIKKLVFDEKKYTFKQLNEALNKDFEGHEELRNDCLKAPKYGNDDDYADLIAVDLVNYTENEHRKYKTLYSVLSHGTLSISNNTPFGQLTGASANGRKAWAPLSDGISPTQGADFKGPTATIKSVSKMACDNMNIGMVHNFKLMSGLLDTPEGEEGIVTLLRTASMLGVGEMQFNYLDNETLIKAQKNPEQYRDLIVRVAGYSAFFVELCKDVQDEIISRTMLTKI

SEQ ID NO: 835 - DNA, 948 bp, Alkaliphilus metalliredigens QYMF
atgagctattgtacaaaaaatacaataaaagatacaggaaggatattcaacatccaaaagtataatacctatgatgggccaggggttagaactctagtgtttttcaaagggtgcccattaagatgtaaatggtgctcaaatccagaggggttggaaaaggacttcgaagttctttttgatgaaaagatatgcagtaggtgtcaaacttgtgttgcagtatgtcctgttgggattcatagtgctcaagggggaaaacacttaattgatcgcagcaaaacctgcattgggtgccggaaatgtgaagaagaatgtcaaaagaacgcaatatccattatgggggaagacaaaactgtagaggaacttcttgagattattgaagaagattcacccttttatgatttatcagggggaggggtgactctaggtggaggcgaagtcttgatgcaatctgattttgcagggcagctcttaaaagcatgtaagaaggaatggattcatacagctattgagacaagtggttatgtgaattctgaaaatctattgaaattagcggaaaatgtagatttatttctttatgatctaaagcatattaactctgaaaagcattatcagtggacaggtgtgtataatgatagaattttcgataatttaaaagagcttctcaacaggaagtataatgttaaaattagaatgcctcttttaaaaggggtgaatgatcgaaaggaagacattgataagctgatgagatttattgagccctataaaaattatgaaaactttaaaggaattgatttattaccttatcataaactcggagtaaacaaatatagattattagataaaacctaccccattgagggagatcctagtttaaataaagaggatttaaagaagatcgagagttggatagaaaaatacgatttacccgttacggtaattcttcattaa

SEQ ID NO: 836 - protein, 315 aa, Alkaliphilus metalliredigens QYMF
MSYCTKNTIKDTGRIFNIQKYNTYDGPGVRTLVFFKGCPLRCKWCSNPEGLEKDFEVLFDEKICSRCQTCVAVCPVGIHSAQGGKHLIDRSKTCIGCRKCEEECQKNAISIMGEDKTVEELLEIIEEDSPFYDLSGGGVTLGGGEVLMQSDFAGQLLKACKKEWIHTAIETSGYVNSENLLKLAENVDLFLYDLKHINSEKHYQWTGVYNDRIFDNLKELLNRKYNVKIRMPLLKGVNDRKEDIDKLMRFIEPYKNYENFKGIDLLPYHKLGVNKYRLLDKTYPIEGDPSLNKEDLKKIESWIEKYDLPVTVILH

SEQ ID NO: 837 - DNA, 354 bp, Alkaliphilus metalliredigens QYMF
atgggagatgttggagaaaaatcgatgcaaagagtaatacaagaatctgtaccaggaaaacaagtaacgattgctcatattattgcatcgcccatgaatgggatttatgaaagattaggaattgaagaaaatgaagccataggaatactcacgattactccttacgaagcttcgattattgcagctgatattgtaacgaaaagtgcagatgtggagattggttttttagatcgatttacaggttctttaattgtcactggggatgtacaatcggtagaaaccgcattaaacagtgtaaatgaaaccctaaaggaacttttaaacttcacgattcctaaggtaaccagaacatga

SEQ ID NO: 838 - protein, 117 aa, Alkaliphilus metalliredigens QYMF
MGDVGEKSMQRVIQESVPGKQVTIAHIIASPMNGIYERLGIEENEAIGILTITPYEASIIAADIVTKSADVEIGFLDRFTGSLIVTGDVQSVETALNSVNETLKELLNFTIPKVTRT

SEQ ID NO: 839 - DNA, 450 bp, Alkaliphilus metalliredigens QYMF
atgagaaaaaaaagagtgatgattattggtccgaaacaaagtggaaaaacctcattggctaggatactgaatcatagcaatcaaaggatgaaaaagtctcaagacatcatctatgataaaaacacgattgatattcccagttcttttatagaaaatccatcgatgtataaacacctcattgctttagcacaagatgcatcccacattttaatcttagtggaccagataagtcctattaatttgtatccgccaggtttcgcaaaatcattcaattctccggtcatcggtgtgatcacaaaggtaaacaaggacatagaaaatgaagatttgtgcaaaaaatacctaaaaatggcaggtgtatctgagccgtattattatcttaatacgaaggagcacacagggatttcactactcaaatgtcggttaaaattaagtgaagttcactggtaa

SEQ ID NO: 840 - protein, 149 aa, Alkaliphilus metalliredigens QYMF
MRKKRVMIIGPKQSGKTSLARILNHSNQRMKKSQDIIYDKNTIDIPSSFIENPSMYKHLIALAQDASHILILVDQISPINLYPPGFAKSFNSPVIGVITKVNKDIENEDLCKKYLKMAGVSEPYYYLNTKEHTGISLLKCRLKLSEVHW

SEQ ID NO: 841 - DNA, 639 bp, Alkaliphilus metalliredigens QYMF
atgatgaatttcattacagaagaagaactgaggagcaaaaaacatgtagagccttttacgatttacagaatgaaaagtggagaaaaattaacacctagtgccagacagtatttgctagatcaaaagatcgatatcgtggaagtatctgaaactacaataaaaaagactagttattttgaaaattgggttgaaaaacaattgaaatggctaggatctgagattttactggtagccgtagaactttttgaaaaggatcctaaggttgtggaggaattgataaaaatcaagaagcatttcagtggaaaagataatgcatgttcttctatagaagaacattcatttattgattgtcatgggatgaagtttgaggggcgatggttaaatcaagatgattgctttgaaatctctgaagaacacctaaaaaatcccaaaggtaaagaaatgcttttactccatggactgcggtctaaaataagaggggttgaggcaggaatcttgttggaactacattgtaacagtaaagaatctaatgaagcgttatcacaagaaattttacaaaaattgtatctatgcatgaaccgtttatcacaaatgatttgtatgggttatggaggtgaaaaatgtcacaaaaatcattga

SEQ ID NO: 842 - protein, 212 aa, Alkaliphilus metalliredigens QYMF
MMNFITEEELRSKKHVEPFTIYRMKSGEKLTPSARQYLLDQKIDIVEVSETTIKKTSYFENWVEKQLKWLGSEILLVAVELFEKDPKVVEELIKIKKHFSGKDNACSSIEEHSFIDCHGMKFEGRWLNQDDCFEISEEHLKNPKGKEMLLLHGLRSKIRGVEAGILLELHCNSKESNEALSQEILQKLYLCMNRLSQMICMGYGGEKCHKNH

SEQ ID NO: 843 - DNA, 846 bp, Alkaliphilus metalliredigens QYMF
atgtcacaaaaatcattgaatcatcataacagtgatttatttgttaaagaatttgaaaaagtgatagaaaaacccaaaacagaaaaatcaaaggtatattatacaggaattgatttaggaacagcctgtgttgtgatctccgtgcttaatgaatatcatcaacccgtggcaggagcatacaaatatgcggatgtggttcgcgatggcatggtagtagactatatcggagcgataaaaattgtacgggaactaaaacaagaaatcgaagagaaactaaagacagagttaatatatggagcagccgcaattccacctggaaccgatgttttagattctggggtagtaagaaatgtagtggaggcagctgggtttgttttgacaaatgttttagacgaaccaactgctgcaaacaaagtactaaatatccaaaatggtgcagtggtagatataggaggcggtactactgggatatctatcttaaaggatggggaagtagtttatattgccgatgaagccacaggtggcacgcatttttctttagtactttcgggttcatatgggtggccctttgaagaagcagaagtgtttaagcgagaaaagaaaaatcacaaggaaatattaccaattttaaagccagtcattgagaagatctcatctattattagcagacatactgatcaccgggatgttagggaaattcatttggttggtggaacatcttgtttaacggggattgaaaaaatcattgagaaaagaactgggattaccacctataaacctcgcaatcctatgtttgtcacaccgttaggtattgcgttgagttgcacccaagaagaattagaatag

SEQ ID NO: 844 - protein, 281 aa, Alkaliphilus metalliredigens QYMF
MSQKSLNHHNSDLFVKEFEKVIEKPKTEKSKVYYTGIDLGTACVVISVLNEYHQPVAGAYKYADVVRDGMVVDYIGAIKIVRELKQEIEEKLKTELIYGAAAIPPGTDVLDSGVVRNVVEAAGFVLTNVLDEPTAANKVLNIQNGAVVDIGGGTTGISILKDGEVVYIADEATGGTHFSLVLSGSYGWPFEEAEVFKREKKNHKEILPILKPVIEKISSIISRHTDHRDVREIHLVGGTSCLTGIEKIIEKRTGITTYKPRNPMFVTPLGIALSCTQEELE

SEQ ID NO: 845 - DNA, 321 bp, Alkaliphilus metalliredigens QYMF
atggaactaaaaatcatcaaatcgccaacaaaaggaaccctagatatattgaataaaagactaggactaaatgccaaaggagacattttagaagcagatgctttgggattgatgcaaggaaaaatgattgatatgatccatgcttcagacattgctgaaaaaactgcaggcgtaatggtctccgacatcaatggaagctgtcctcaaaatatgattatgattgcaatctggggagacacttcctcggttgaatctgcattcgatgagatcaaaagagaacttggaaaggagaaaacctatgctaattggaaaactcattaa

SEQ ID NO: 846 - protein, 106 aa, Alkaliphilus metalliredigens QYMF
MELKIIKSPTKGTLDILNKRLGLNAKGDILEADALGLMQGKMIDMIHASDIAEKTAGVMVSDINGSCPQNMIMIAIWGDTSSVESAFDEIKRELGKEKTYANWKTH

SEQ ID NO: 847 - DNA, 264 bp, Alkaliphilus metalliredigens QYMF
atgctaattggaaaactcattaataatgtatgggcaacaaaaaaggcccatgccctcgatggatttaaattcatgttagcagaagaaatccaaggttcaaacaaagggagaagatttatcgttgtagatatcgttggtgcaggtattggtgatgtggtaattgtttgtacaggatcaggagcaagaaaaatgctttgcaatgatgagttgccagtagatgcagcagttgtagggattgttgatgaagattgtaactttaaataa

SEQ ID NO: 848 - protein, 87 aa, Alkaliphilus metalliredigens QYMF
MLIGKLINNVWATKKAHALDGFKFMLAEEIQGSNKGRRFIVVDIVGAGIGDVVIVCTGSGARKMLCNDELPVDAAVVGIVDEDCNFK

SEQ ID NO: 849 - DNA, 1338 bp, Alkaliphilus metalliredigens QYMF
atgaatcttcgggatcagataaaagaagcaggtgtcattggagctggtggtgctggttttccaacccatgtgaaactcgatgcaaaagctgaattcgttcttttgaatggcgcagaatgtgaacccctactaagggtagatcaacagctgatggaatattttccagaagaagtcattaagggtttagaaaaagcgagacagcatgttaaagggaaaaaagcattgatcggaattaaggaaaaacacaccaaggtaattgacaaattagaaagaaaaattaaagaattacaagtagaatcaacggtggaaattaaaaaaatggctgacgtttatccagctggagatgaacaggttttagtttatgagcttacagggagggttgttcctgaagctggaatacccattcatgtaggttgtgtcgtgatcaattctgaaacagcactaaatattcacagagccatcaatcaagatccagttacacacagttatatcactgtttcaggtgacgtgcccaaccccttaacggcaaaagtacccgtaggaatgaaaattatcgatgctttaaaattgacgggtatcaatgattttcaaaaccatcgagttattgatggtggcccgatgatgggaagagtgctggaatctttagaaggatcagtaactaagaaaagcaaaggatacattgttcttcataaagatcactatttaatcaagaaaaaaactgtaacctggaaacaaagtaggcgtataaacagatcggcctgtgaacaatgtcgcttatgtactgacttatgtccgcgttttttgattggtcatagcatacaacctcataaaattatgaatgcatccaattacttaacaccaaatatgaatcatttaaaaagagttcaactttgttgtcagtgcaatttatgtgagcttttcgcatgtaaatctgggctttatccccaaaggaataatactttttttaaagaggagttagcagagcataaagtgaaataccaacctcaagaaaaatcttataaaccccatgaaatacgtgaatatagaatggttccaagtaaaagactggtagcccgtttaggattaagcaaattcgatgaaaaagcaccattgataaaagaggaagtaagggtagatgaagtgattatatcaatgcgccagcatgtaggagcaccatcgaatccgattgtatcagttaacgatgaagtacagctaggtcaaatgatcgggagagctcctgatggaagcttaagtgctagtactcatgctagtatatctggaaaagtgtcaagtgttgagaaagatttcattgttataaggggtgaaaagtatgtctaa

SEQ ID NO: 850 - protein, 445 aa, Alkaliphilus metalliredigens QYMF
MNLRDQIKEAGVIGAGGAGFPTHVKLDAKAEFVLLNGAECEPLLRVDQQLMEYFPEEVIKGLEKARQHVKGKKALIGIKEKHTKVIDKLERKIKELQVESTVEIKKMADVYPAGDEQVLVYELTGRVVPEAGIPIHVGCVVINSETALNIHRAINQDPVTHSYITVSGDVPNPLTAKVPVGMKIIDALKLTGINDFQNHRVIDGGPMMGRVLESLEGSVTKKSKGYIVLHKDHYLIKKKTVTWKQSRRINRSACEQCRLCTDLCPRFLIGHSIQPHKIMNASNYLTPNMNHLKRVQLCCQCNLCELFACKSGLYPQRNNTFFKEELAEHKVKYQPQEKSYKPHEIREYRMVPSKRLVARLGLSKFDEKAPLIKEEVRVDEVIISMRQHVGAPSNPIVSVNDEVQLGQMIGRAPDGSLSASTHASISGKVSSVEKDFIVIRGEKYV

SEQ ID NO: 851 - DNA, 549 bp, Alkaliphilus metalliredigens QYMF
atgtctaaggccattggaatgatggagcttctaagcatttctcgaggcatttatgtagcggatcagatgttaaaaacttcagaagtggagattatcacagcgggatctacctgtccaggaaaatacattgctattgtccatggtgatgtggcatcagtagaagacgctgtggcagttggaatccatgagggagcagaacacgtaattgactctattgtcatacccaatattgattctcaaatcttttcagcgattgttggcgcaaccatgccagaatcgattcaagccttgggaatacttgaatcttttgatttagcaaccatgataatttccgcagatgcgatattaaaagcagcagagttagaacctatagaattgcgtctgggaaatggtctaggaggaaagtcattttttgttttcacaggagatgtagcagctgttgagacaggaattcaagcaggtctaggggtagcaaaagaacatggacccattgtaaatgtggaaatgattccatcaccttcgaaatctttattgacatcgattctttaa

SEQ ID NO: 852 - protein, 182 aa, Alkaliphilus metalliredigens QYMF
MSKAIGMMELLSISRGIYVADQMLKTSEVEIITAGSTCPGKYIAIVHGDVASVEDAVAVGIHEGAEHVIDSIVIPNIDSQIFSAIVGATMPESIQALGILESFDLATMIISADAILKAAELEPIELRLGNGLGGKSFFVFTGDVAAVETGIQAGLGVAKEHGPIVNVEMIPSPSKSLLTSIL

SEQ ID NO: 853 - DNA, 681 bp, Alkaliphilus metalliredigens QYMF
atgaagagcttaatctgtgcaagggatgtggaagtaacccatgacaaaggggtaaaaacaatccttgttgatgagaacaccatcatcactccatccgcaaaagatgttgctaaggctatggaagttcagtttgtttatcaagaagaaaattgcagtgatttgatgttccaaaatgaatttgaagatccaaagatttcaaacaaggaaaatactgagttagacagtgaaatgatttacaaagctttattagtattgaaaaaccaaggtttgctagaaaacatcattaactctgttttaggtgagcagccctattcttatgagaaggcttctaatggtattaaagttgtacgtggtcagtcagtgaagttcaaaccttcgtatatgggagtggaaaatcatcagttaaaatcccaagaattagtgggtaaagatgaaggaactatgaattcaggattttttatcattgatcacacgagtttttataaaaaagtggaatgggaagagatgaattatattacagaaggatccgtctctatttccatcgatggacataaaatccacgcaaataaaggtgatgtggtccatataccggcaggttctagcgtgaccagagcatcaatggacaaagcaaaagtgttttataccatatgccaaaatgttaaaagtaaagtgatggcataa

SEQ ID NO: 854 - protein, 226 aa, Alkaliphilus metalliredigens QYMF
MKSLICARDVEVTHDKGVKTILVDENTIITPSAKDVAKAMEVQFVYQEENCSDLMFQNEFEDPKISNKENTELDSEMIYKALLVLKNQGLLENIINSVLGEQPYSYEKASNGIKVVRGQSVKFKPSYMGVENHQLKSQELVGKDEGTMNSGFFIIDHTSFYKKVEWEEMNYITEGSVSISIDGHKIHANKGDVVHIPAGSSVTRASMDKAKVFYTICQNVKSKVMA

SEQ ID NO: 855 - DNA, 600 bp, Alkaliphilus metalliredigens QYMF
atggaggccttgggtttaattgaaacaaaaggacttatcgctgcaatagaaagtgcagatgcaatgctgaaagctgctaatgtaaagttactagagaaaactgaagtaggtggaggcttagttacgattgtggtcagtggtgatgttggagctgtaagcgcttctgtagaggcaggtgctgtagccgcccagagagtagatgaaaattcgttgatatcaaaacatgtaattccaagacccgatcatgaactaaggaacatcattgctacgaaggaacaagaggaatcaaaaaacatgttagaagaaaaaaaagaagatgttcagcttatagatcaagagaaagaagagaaagaagaagtagtggtagtggatactgttcctaaagaagaaaagtctttagataacaagatatctatcgatgcaatggttgtagaagttggtctaaagaaaataatggaaaaattaagccgcaagaaagtcgtagaattaagggatttagtgagacagtatacagactttggcatcacaggtaggggtatttcaagcgcaaacaagaaaaaattgctcagtgagctacagaaatattatcagaagaaataa

SEQ ID NO: 856 - protein, 199 aa, Alkaliphilus metalliredigens QYMF
MEALGLIETKGLIAAIESADAMLKAANVKLLEKTEVGGGLVTIVVSGDVGAVSASVEAGAVAAQRVDENSLISKHVIPRPDHELRNIIATKEQEESKNMLEEKKEDVQLIDQEKEEKEEVVVVDTVPKEEKSLDNKISIDAMVVEVGLKKIMEKLSRKKVVELRDLVRQYTDFGITGRGISSANKKKLLSELQKYYQKK

SEQ ID NO: 857 - DNA, 1527 bp, Alkaliphilus metalliredigens QYMF
ttggaagattttgatcgagatttacgctctatacaagaagcaagggtcttggcaacaaaagggaaaatcgcatctaatcaaatttcagagtatagtaaagagcaaatagaaaaaattatttgcaatatggttaaagtagcaaaagaaaatgccgtcatgcttgcagaaatggcagtagatgagacgggttttggtacagttaaagacaaaacttataaaaatcatatggcttctgtaatgctatatgaggaaattaaagacatgaaaaccattggtataatcgatgaagatcaagaaaaacaagtgattgatttagcagaacctatgggtttgctaatggggattattccatctactaacccaacttcaacagcaatttttaaatcgattatctccataaagtcccgaaatgggattgtgttttcacctcatcctgcatcattgaaatgtaccgtgaaagccatccaattaatgaatgatgcagccgttcaagcgggagcgccagaaaatattatcagtagcattacgacacctagtgtagaagctaccaatgcgttaatgaaacataagaatattgctttaattattgctacaggagggccaggaatggtaaaagcctcttatagcgcagggaaaccagctttaggggttggggcagggaattcacctgcatacattgaaaaatcagcaaatataccgaaggccataagcaatattattgcaagtaaaacctttgatcatgggaccatttgtgcatctgaacaatcgattattgttgaggaaagcaacagtgatgaagtgatagaagaacttaaaaaacaaggtgcatattttatgacggaggaggaaacaaagcgagtttgcaaaataatatttaaagatggacataccatgaatgcaaactttgttggaaaaccccctcaagtaattggcgatgcagcaggaattgttatccctcaagggacaaagttattagtaggagaacaaaaaggggtaggaacagggtttccactatcttacgaaaagctaactacagtaattgctttttataaggtgaaagattgggaagaggcatgtaacttaagtattgatttactccaaaatgggataggacatacgatgtgtcttcatacggaggatcgagaaatggttatgaagttcgctaaaaaaccagcatctcgtattcttgtaaatacaggtggagcacaaggcggtactggtgcaagtacagggttatttccatcatttacccttgggtgtggaacctggggagggagttcaacctctgaaaatgtttcacctatggatttaatcaatattaaacgcgtcgcttatggactatcggattgcgcaacgctagcatcacgagatagaacttttaactattttgatgttgagaagaataatcttgatattcccaaaaattgtgaagaatcaatgcaaaacaacgattctacagacattgacaatgacaagcttgtgaaaatggtatatgagctagtggaagcaatgaaaggggctaattaa

SEQ ID NO: 858 - protein, 508 aa, Alkaliphilus metalliredigens QYMF
MEDFDRDLRSIQEARVLATKGKIASNQISEYSKEQIEKIICNMVKVAKENAVMLAEMAVDETGFGTVKDKTYKNHMASVMLYEEIKDMKTIGIIDEDQEKQVIDLAEPMGLLMGIIPSTNPTSTAIFKSIISIKSRNGIVFSPHPASLKCTVKAIQLMNDAAVQAGAPENIISSITTPSVEATNALMKHKNIALIIATGGPGMVKASYSAGKPALGVGAGNSPAYIEKSANIPKAISNIIASKTFDHGTICASEQSIIVEESNSDEVIEELKKQGAYFMTEEETKRVCKIIFKDGHTMNANFVGKPPQVIGDAAGIVIPQGTKLLVGEQKGVGTGFPLSYEKLTTVIAFYKVKDWEEACNLSIDLLQNGIGHTMCLHTEDREMVMKFAKKPASRILVNTGGAQGGTGASTGLFPSFTLGCGTWGGSSTSENVSPMDLINIKRVAYGLSDCATLASRDRTFNYFDVEKNNLDIPKNCEESMQNNDSTDIDNDKLVKMVYELVEAMKGAN

SEQ ID NO: 859 - DNA, 657 bp, Alkaliphilus metalliredigens QYMF
atgagtgctcatgaagaagtattagcgcttttattagaagtaataaaaaataacacttcttctaatgattctacagtacctaaagaccctgaagaaatccctgtaggggtatcgaatcgacatgctcatctctctcaatccgatgtagataaattgtttggtacaggctatcagctcacaaaatctaaagatttatcacaaccaggtcaatatgcttgcaaagaaacacttattctctgtggacctaaaggctctatcgaaaaagttcgaattctaggtccagttagaaggagtacccaagtggaggttttagcaagtgatagttataagttaggcgttcatcctgaagtgcgtttatctggagacctcgagggaactgatgggataacacttgtgggtcctaggggagcttcgatgatgagtaagggattaattattgccaaaaggcatattcatatgcattgcaaggaggcgaaagcctttggagtaagtgatggtcaagtggttgcagttgaagtttgtggcaatcgaggtggagtttacaatcatgttgaaatcagagcgacagaaaactcagcaatagagtttcatgtggatatggaagaagcaaatgcaatgggtatcaatggtttttctaaagttaaaataaaaaaataa

SEQ ID NO: 860 - protein, 218 aa, Alkaliphilus metalliredigens QYMF
MSAHEEVLALLLEVIKNNTSSNDSTVPKDPEEIPVGVSNRHAHLSQSDVDKLFGTGYQLTKSKDLSQPGQYACKETLILCGPKGSIEKVRILGPVRRSTQVEVLASDSYKLGVHPEVRLSGDLEGTDGITLVGPRGASMMSKGLIIAKRHIHMHCKEAKAFGVSDGQVVAVEVCGNRGGVYNHVEIRATENSAIEFHVDMEEANAMGINGFSKVKIKK

SEQ ID NO: 861 - DNA, 903 bp, Salmonella typhimurium LT2
atgcgcgcacactattcgtacctgaaaggtgataatgtggctgttgcgcaatgccccgcctcatgcggggaacttatccagggatggattctgggcagtgagaaactggtctcctgccccgttgactggtacagcaccgtagcagtcacggctgcgccgccgttgataaacgagcgcccattgtcgcgggcgatggtggagcgcgttctggcgcactggcagtatcctgcgcactggagtaacgagattcgcgtcgatgtgcgttcgtcaattcccgttgccaaaggcatggccagcagcaccgcagatattgccgctacggcggtggcaacggcgcatcatcttggccattcgctggatgaaaccacccttgcacagctttgcgtctcaatcgaacccactgatagcaccgtttttcatcagttaacgctgtttgatcataataatgcggccacgcaaatcgcctgcgagccaccgccgccaatcgatttgctggtactggaaagcccggtcacactgcgcacgcaagattaccaccgtctccctcgccagcagaaattaatagcaagttcagcaaccttgcagcaggcctggaatctggtgcaggaagcctgtataacgcaaaatccgctccggctgggtgaggcggctacgcttagcgctatcgccagccagacgctgttacctaagccgggctttaccgccctgctgtcgctggtcgaagagtgtgatttatacggattgaacgtggcgcatagcggtagcgtggtgggtctgatgctggaccggaaacgtcatgatattgcgcgtctgaaaggtaagctggcagagaaaaaacttacccgacactggccaaaacaacatttactcaagatggtcactggcggggtcaaactgcagtga

SEQ ID NO: 862 - protein, 300 aa, Salmonella typhimurium LT2
MRAHYSYLKGDNVAVAQCPASCGELIQGWILGSEKLVSCPVDWYSTVAVTAAPPLINERPLSRAMVERVLAHWQYPAHWSNEIRVDVRSSIPVAKGMASSTADIAATAVATAHHLGHSLDETTLAQLCVSIEPTDSTVFHQLTLFDHNNAATQIACEPPPPIDLLVLESPVTLRTQDYHRLPRQQKLIASSATLQQAWNLVQEACITQNPLRLGEAATLSAIASQTLLPKPGFTALLSLVEECDLYGLNVAHSGSVVGLMLDRKRHDIARLKGKLAEKKLTRHWPKQHLLKMVTGGVKLQ

SEQ ID NO: 863 - DNA, 1215 bp, Salmonella typhimurium LT2
atgtcttacaaaataatggccattaacgccggtagctcatcgttaaaatttcagctgctggagatgccgcagggcgacatgctctgtcaggggctgattgagcgtatcggtatggcagatgcgcaggtgacaattaagacgcacagccaaaaatggcaggaaaccgtccccgttgccgatcatcgcgatgcggtaacgctgcttctggaaaagctgctgggttatcaaatcattaacagtctgcgggacattgatggggtgggccatcgtgtggcgcacggcggtgagttttttaaagactcgacgctggtcacggatgaaacgttagcgcaaatcgaacgtcttgctgaactggccccgcttcacaacccggtaaacgcgttgggtattcacgtttttcgtcaactgttgcctgatgccccttccgtagccgtgtttgatacggcatttcaccagacgctggatgaacccgcctatatttacccgcttccctggcattattacgctgaactggggattcgccgttatggctttcatggcaccagccataagtatgtcagcggcgttctggcggaaaagctgggcgtaccactcagcgcattacgggtgatttgttgtcatcttggaaacggtagcagcatctgcgccatcaagaacgggcgttcggtcaatacgtcgatgggctttacgccgcagtcaggcgtgatgatgggcacccgtagcggagatattgatccctctattctgccgtggatagcccagcgcgaaagcaaaacgccgcaacagttgaatcagttattaaataatgagtcaggcttgctgggcgtttctggcgtgtcgtctgattaccgcgatgtcgaacaggcagccaataccggtaaccggcaggctaaactcgctctcactctgtttgccgaacgcattcgcgccaccattggcagctatattatgcaaatgggaggactggatgcgctggtattcactgggggcattggcgagaactcagcgcgcgccagatcggcggtgtgccataatttgcaatttttgggcttagccgttgatgaagagaaaaatcagcgtaatgcgacatttatccagacggagaacgccctggtgaaagtcgccgtcatcaacaccaacgaagagttaatgatcgcacaagacgttatgcgcattgcgctaccggccacggaagggctttgtgtaccagcctga

SEQ ID NO: 864 - protein, 404 aa, Salmonella typhimurium LT2
MSYKIMAINAGSSSLKFQLLEMPQGDMLCQGLIERIGMADAQVTIKTHSQKWQETVPVADHRDAVTLLLEKLLGYQIINSLRDIDGVGHRVAHGGEFFKDSTLVTDETLAQIERLAELAPLHNPVNALGIHVFRQLLPDAPSVAVFDTAFHQTLDEPAYIYPLPWHYYAELGIRRYGFHGTSHKYVSGVLAEKLGVPLSALRVICCHLGNGSSICAIKNGRSVNTSMGFTPQSGVMMGTRSGDIDPSILPWIAQRESKTPQQLNQLLNNESGLLGVSGVSSDYRDVEQAANTGNRQAKLALTLFAERIRATIGSYIMQMGGLDALVFTGGIGENSARARSAVCHNLQFLGLAVDEEKNQRNATFIQTENALVKVAVINTNEELMIAQDVMRIALPATEGLCVPA

SEQ ID NO: 865 - DNA, 453 bp, Salmonella typhimurium LT2
atgaagcgtttgatgtttatcggccccagccagtgcggaaaaacctcgctgacccaaagcctgcgcggcgaagcgctccattataagaaaactcaggccattgaatggtcgccgatggccatcgatacgccgggcgaatatctggagaaccgctgcctgtacagcgccctgctgaccagcgcctgcgaggccgacgtcatcgccctggtgctgaatgccgacgcccagtggtcgcccttttctccgggttttaccgccccgatgaaccgcccgacgattggcctggtcaccaaggccgatctcgccgagccgcagcgtatttcgctggttgcggagtggcttacgcaggctggcgcacagcagatttttattaccagcgcgctgaataactcgggtctcgacgccgtgctggattttctgaattcgaaggaacctttatgtcttacaaaataa

SEQ ID NO: 866 - protein, 150 aa, Salmonella typhimurium LT2
MKRLMFIGPSQCGKTSLTQSLRGEALHYKKTQAIEWSPMAIDTPGEYLENRCLYSALLTSACEADVIALVLNADAQWSPFSPGFTAPMNRPTIGLVTKADLAEPQRISLVAEWLTQAGAQQIFITSALNNSGLDAVLDFLNSKEPLCLTK

SEQ ID NO: 867 - DNA, 351 bp, Salmonella typhimurium LT2
atggaaagacaaccgacaacggatcgcatgattcaggaatacgtgccggggaaacaggtcactctcgcgcacctgattgctaatccagggaaagatctctttaagaagctgggcctgcaggatgcagtgtccgccattggcatccttaccatcacgccgagcgaagcatcgattatcgcctgcgatatcgccaccaaatccggcgcggtggaaattggttttctcgatcgctttaccggtgccgtggtgctgaccggcgacgtttctgccgtcgagtatgccctcaagcaggtaacgcgcacgctgggcgaaatgatgcagttcaccacttgctcgatcacccggacgtaa

SEQ ID NO: 868 - protein, 116 aa, Salmonella typhimurium LT2
MERQPTTDRMIQEYVPGKQVTLAHLIANPGKDLFKKLGLQDAVSAIGILTITPSEASIIACDIATKSGAVEIGFLDRFTGAVVLTGDVSAVEYALKQVTRTLGEMMQFTTCSITRT

SEQ ID NO: 869 - DNA, 555 bp, Salmonella typhimurium LT2
atgtctcaggctataggaattttagaactcaccagcatcgccaaaggcatggagcttggtgatgccatgctgaaaagcgccaacgtcgatctactggtcagcaagaccatctgtccggggaagtttttactgatgctgggcggcgatatcggcgctatccagcaggccattgaaaccggtacgtcgcaggccggcgagatgctcgtcgacagcctggtgctggcgaatattcatcccagcgtacttccggccatcagcggcctgaacagcgtcgataagcgccaggcggtaggtatcgtcgaaacctggagcgtggcggcctgcattagcgccgcagaccgggcggtgaaaggctcaaacgtcaccctggtgcgggtgcatatggccttcggtatcggcggtaaatgctacatggtggtggcgggcgacgtttctgacgtcaataacgccgtgacggttgccagcgaaagcgcgggcgagaaagggttgttggtttaccgttcggtgatcccacgcccgcatgaagccatgtggcgacagatggtggaggggtaa

SEQ ID NO: 870 - protein, 184 aa, Salmonella typhimurium LT2
MSQAIGILELTSIAKGMELGDAMLKSANVDLLVSKTICPGKFLLMLGGDIGAIQQAIETGTSQAGEMLVDSLVLANIHPSVLPAISGLNSVDKRQAVGIVETWSVAACISAADRAVKGSNVTLVRVHMAFGIGGKCYMVVAGDVSDVNNAVTVASESAGEKGLLVYRSVIPRPHEAMWRQMVEG

SEQ ID NO: 871 - DNA, 1356 bp, Salmonella typhimurium LT2
atgagcaccgccatcaacagcgttgaaatgtcccttagcgccgatgaaattcgcgagcgcgttcgcgcagcgggcgttgtcggcgcgggcggcgcaggttttcccgctcacgtcaaactacaggcgcaggtagagatttttctggtgaacgccgccgaatgtgaaccgatgctcaaagttgaccagcaactgatgtggcagcaagctgcgcgccttgtgcgcggcgtacagtacgccatgacggcaaccggcgcgcgcgaaggggtgatagccctgaaagaaaaataccgccgggccatcgacgccctcaccccactgctgccagacggtatccgcctgcatatcctgccggatgtatatccggcaggcgatgaggtgctgactatctggatggcaaccggtcgtcgggtcgccccggctgcgctaccggccagcgtcggcgtggtcgtcaataacgtgcaaacggtgctaaatattgcccgagcggtcgagcagcggtttccggtcactcgtcgcacgttgaccgtgaacggcgcggtcgccagaccgttgaccgttactgttcccatcggcatgtcgctgcgggaagtactggcgctggcgggcggcgcaacggtcgacgaccctggttttattaacggcggcccgatgatgggtggcctgattacctctcttgataatccggtgacgaaaactaccggcggcctgctggtgctccccaaaagccatccgcttatccagcggagaatgcaggacgagcgcacggtgctttccgtcgcgcgcaccgtctgcgaacagtgccgactgtgtaccgatctctgtccgcgacacctgatcggccacgaactctctccgcacctgctggtgcgggcggtgaactttcatcaggctgccacgccgcagctgctgctgagcgcccttacctgttcggaatgcaacgtttgcgaaagcgtggcctgtccggtggggatctcgccgatgcgcatcaaccgcatgttaaaacgcgagctacgggcgcaaaaccagcgctacgaagggccgctgaatccggccgacgagatggcgaaatatcgcctcgtgccggtgaagcggctgatcgccaaactgggactaagcccctggtaccaggaagcgccgctggttgaagaagaaccgtcagtagaaaaagtcactttgcagctgcgccagcatattggtgccagcgcggtagcgaacgttgcggtgggagaacgcgtgacgcgcgggcaatgcgttgctgatgtcccgcctggcgcgctcggcgcacccattcacgccagcatcgacggcgttgtatcggccatcagcgaacaggccatcactgttgtaagaggttaa

SEQ ID NO: 872 - protein, 451 aa, Salmonella typhimurium LT2
MSTAINSVEMSLSADEIRERVRAAGVVGAGGAGFPAHVKLQAQVEIFLVNAAECEPMLKVDQQLMWQQAARLVRGVQYAMTATGAREGVIALKEKYRRAIDALTPLLPDGIRLHILPDVYPAGDEVLTIWMATGRRVAPAALPASVGVVVNNVQTVLNIARAVEQRFPVTRRTLTVNGAVARPLTVTVPIGMSLREVLALAGGATVDDPGFINGGPMMGGLITSLDNPVTKTTGGLLVLPKSHPLIQRRMQDERTVLSVARTVCEQCRLCTDLCPRHLIGHELSPHLLVRAVNFHQAATPQLLLSALTCSECNVCESVACPVGISPMRINRMLKRELRAQNQRYEGPLNPADEMAKYRLVPVKRLIAKLGLSPWYQEAPLVEEEPSVEKVTLQLRQHIGASAVANVAVGERVTRGQCVADVPPGALGAPIHASIDGVVSAISEQAITVVRG

SEQ ID NO: 873 - DNA, 1113 bp, Salmonella typhimurium LT2
atgaataccttctcactacaaacgcggttgtacagcggtcagggcagcctggcggtgctcaagcgctttaccaataagcacatctggataatctgcgatggctttctggcgcactctccgctgctggataccctgcgtaacgcgctgcccgcagataaccgcatcagcgtctttagcgagataacgccggaccccaccatccacacagtggttcagggcattgcgcaaatgcaggctctgcaaccgcaggtggtgatcggttttggcggcggctcggcaatggacgcggcgaaagcgattgtctggtttagccagcagagcgggatcaacatcgaaacctgcgtggcgatcccgaccaccagcggcaccggctcggaagtgaccagcgcctgcgtaattagcgacccggataaaggcatcaagtatccgctgttcaacaatgcgctgtatccggatatggcgatcctcgacccggagctggtggtcagcgtaccgccgcagattaccgccaacaccggcatggacgtgctgacccacgccctggaggcctgggtgtcaccgcgcgccagcgactttaccgacgcgctagcggaaaaagccgccaaactggtgttccagtatctgcccacggcggtggaaaaaggcgactgcgtggcgacgcgcgggaaaatgcacaatgcctcaacgctcgccgggatggccttcagccaggcggggctggggcttaaccacgcgatagcccaccagcttggcgggcagtttcatctgccgcatggcctggccaacgccctgctgttaaccacggttatccgttttaacgccggcgttccgcgcgccgccaaacgctacgcgcggctggccaaagcctgcggtttttgcccggcagaagccaatgatatcgcggcgatcaatgcgctgattcagcaaatcgaactgcttaagcaacgctgtgtccttccctcactggccgttgcgcttaaagaaggaagatccgacttttccgcacgcattccggcgatggtgcaggctgcgctggctgacgttacgctgcgcactaacccgcgcccggccaatgccgaagccattcgggaactgctggaggaactgctatga

SEQ ID NO: 874 - protein, 370 aa, Salmonella typhimurium LT2
MNTFSLQTRLYSGQGSLAVLKRFTNKHIWIICDGFLAHSPLLDTLRNALPADNRISVFSEITPDPTIHTVVQGIAQMQALQPQVVIGFGGGSAMDAAKAIVWFSQQSGINIETCVAIPTTSGTGSEVTSACVISDPDKGIKYPLFNNALYPDMAILDPELVVSVPPQITANTGMDVLTHALEAWVSPRASDFTDALAEKAAKLVFQYLPTAVEKGDCVATRGKMHNASTLAGMAFSQAGLGLNHAIAHQLGGQFHLPHGLANALLLTTVIRFNAGVPRAAKRYARLAKACGFCPAEANDIAAINALIQQIELLKQRCVLPSLAVALKEGRSDFSARIPAMVQAALADVTLRTNPRPANAEAIRELLEELL

SEQ ID NO: 875 - DNA, 1395 bp, Salmonella typhimurium LT2
atgaatacttctgaactcgaaaccctgattcgcaccattcttagcgagcaattaaccacgccggcgcaaacgccggtccagcctcagggcaaagggattttccagtccgtgagcgaggccatcgacgccgcgcaccaggcgttcttacgttatcagcagtgcccgctaaaaacccgcagcgccattatcagcgcgatgcgtcaggagctgacgccgctgctggcgcccctggcggaagagagcgccaatgaaacggggatgggcaacaaagaagataaatttctcaaaaacaaggctgcgctggacaacacgccgggcgtagaagatctcaccaccaccgcgctgaccggcgacggcggcatggtgctgtttgaatactcaccgtttggcgttatcggttcggtcgccccaagcaccaacccgacggaaaccatcatcaacaacagtatcagcatgctggcggcgggcaacagtatctactttagcccgcatccgggagcgaaaaaggtctctctgaagctgattagcctgattgaagagattgccttccgctgctgcggcatccgcaatctggtggtgaccgtggcggaacccaccttcgaagcgacccagcagatgatggcccacccgcgaatcgcagtactggccattaccggcggcccgggcattgtggcaatgggcatgaagagcggtaagaaggtgattggcgctggcgcgggtaacccgccctgcatcgttgatgaaacggcggacctggtgaaagcggcggaagatatcatcaacggcgcgtcattcgattacaacctgccctgcattgccgagaagagcctgatcgtagtggagagtgtcgccgaacgtctggtgcagcaaatgcaaaccttcggcgcgctgctgttaagccctgccgataccgacaaactccgcgccgtctgcctgcctgaaggccaggcgaataaaaaactggtcggcaagagcccatcggccatgctggaagccgccgggatcgctgtccctgcaaaagcgccgcgtctgctgattgcgctggttaacgctgacgatccgtgggtcaccagcgaacagttgatgccgatgctgccagtggtaaaagtcagcgatttcgatagcgcgctggcgctggccctgaaggttgaagaggggctgcatcataccgccattatgcactcgcagaacgtgtcacgcctgaacctcgcggcccgcacgctgcaaacctcgatattcgtcaaaaacggcccctcttatgccgggatcggcgtcggcggcgaaggctttaccaccttcactatcgccacaccaaccggtgaagggaccacgtcagcgcgtacttttgcccgttcccggcgctgcgtactgaccaacggcttttctattcgctaa

SEQ ID NO: 876 - protein, 464 aa, Salmonella typhimurium LT2
MNTSELETLIRTILSEQLTTPAQTPVQPQGKGIFQSVSEAIDAAHQAFLRYQQCPLKTRSAIISAMRQELTPLLAPLAEESANETGMGNKEDKFLKNKAALDNTPGVEDLTTTALTGDGGMVLFEYSPFGVIGSVAPSTNPTETIINNSISMLAAGNSIYFSPHPGAKKVSLKLISLIEEIAFRCCGIRNLVVTVAEPTFEATQQMMAHPRIAVLAITGGPGIVAMGMKSGKKVIGAGAGNPPCIVDETADLVKAAEDIINGASFDYNLPCIAEKSLIVVESVAERLVQQMQTFGALLLSPADTDKLRAVCLPEGQANKKLVGKSPSAMLEAAGIAVPAKAPRLLIALVNADDPWVTSEQLMPMLPVVKVSDFDSALALALKVEEGLHHTAIMHSQNVSRLNLAARTLQTSIFVKNGPSYAGIGVGGEGFTTFTIATPTGEGTTSARTFARSRRCVLTNGFSIR

SEQ ID NO: 877 - DNA, 1011 bp, Salmonella typhimurium LT2
atggcgatttatacccgaacaggtgacgctggcaccacatcactgtttaccggccagcgggtgagcaaaacccacccgcgggttgaagcctacggcacgctggatgagctgaacgccgcgctgagcctgtgcgcctgcgccgctgcggatgaaaaccaccgcaccttactcgaggccatccagcagcaacttttttggtttagcgcagagctggccagcgacagcgagcagccatcgcccaaacagcgctacatcagcagcgaagagatttcggccctggaagccgctatcgatcgggcgatggcccgcgtcgaaccgctgcacagctttattttacccggacgctgcgaagccgcgagccgcttacattttgcccgcacgctggcgcgccgcgccgaacgccgtctggttgaactggcaactgaagtcaacgtacgtcaggtgctgatgcgctatatcaaccgcttatcggactgcctgtacgccctggcccgcgcggaagatagcgatgcgcaccaggccaacatcatccgtgaagttagcaagcgctatctggctgcctgccagccgccccacagcaaggagacgacgccagtggccctctcattccacgatctgcaccagctcacccgcgccgccgttgaacgcgcgcagcaactgcaggttccggtagtcgtcagcatcgttgacgcgcacggcacggaaactgtgacctggcggatgccggacgccctgctggtcagcagcgagctggcgccgaaaaaggcctggaccgcagtggcgatgaaaacggcgacccatgagctgagcgatgtcgttcagccgggcgccgcgctttacggtctggaaagtcatttacagggaaaagtggtcacctttggcggcggttacgccctgtggcgcgacggcatattaattgggggtcttggcatcagcggcggcagcgttgagcaggacatggacatagcacagaccgccatcgcggctattaacgtgggaactcatcaatga

SEQ ID NO: 878 - protein, 336 aa, Salmonella typhimurium LT2
MAIYTRTGDAGTTSLFTGQRVSKTHPRVEAYGTLDELNAALSLCACAAADENHRTLLEAIQQQLFWFSAELASDSEQPSPKQRYISSEEISALEAAIDRAMARVEPLHSFILPGRCEAASRLHFARTLARRAERRLVELATEVNVRQVLMRYINRLSDCLYALARAEDSDAHQANIIREVSKRYLAACQPPHSKETTPVALSFHDLHQLTRAAVERAQQLQVPVVVSIVDAHGTETVTWRMPDALLVSSELAPKKAWTAVAMKTATHELSDVVQPGAALYGLESHLQGKVVTFGGGYALWRDGILIGGLGISGGSVEQDMDIAQTAIAAINVGTHQ

SEQ ID NO: 879 - DNA, 276 bp, Salmonella typhimurium LT2
atgcatctggcacgagtcacgggcgcggttgtctccacgcaaaaatcaccttctttgattgggaaaaagctgctgctggtgcgtcgggtcagcgccgatggcgaactccccgcctcgcccacctccggcgatgaagtggccgtggactccgtcggcgcgggcgtcggcgaactggttttgctcagcggcggctccagcgccaggcacgttttttccgggccaaatgaggccattgacctcgccgttgtcggcattgtagatacgctttcgtgttaa

SEQ ID NO: 880 - protein, 91 aa, Salmonella typhimurium LT2
MHLARVTGAVVSTQKSPSLIGKKLLLVRRVSADGELPASPTSGDEVAVDSVGAGVGELVLLSGGSSARHVFSGPNEAIDLAVVGIVDTLSC

SEQ ID NO: 881 - DNA, 492 bp, Salmonella typhimurium LT2
atgaacggcgaaaccctgcagcgcattgtcgaggagattgtctcccggctgcatcgccgtgcccagagcacggcgacgctgagcgttacgcaacttcgcgatgccgactgtccagcactgttctgtcagcacgcgtcgctgcgcatcctgctcatcgacctgccgctgctgggtcagcttgcggatgcagaaaccggcgatgccgccgcccggaaaattcacgacgcgctggcgtttggcatccgcgtacagctcagcctgcacagccagctgctgccggttatcccggtaaaaaaactggctcgtctgccgctggtattcaccgatgagcacggactgccgctggttctgcatgcgggttcggtgctgagctatcgcgatgtcgcgctgctaagccgggggcgtgtggttgtccaccgcaaatgcatcgtgaccgccatggcgcgtgacgcggccaatgcgcggaatattcaattaattaagcaggagtaa

SEQ ID NO: 882 - protein, 163 aa, Salmonella typhimurium LT2
MNGETLQRIVEEIVSRLHRRAQSTATLSVTQLRDADCPALFCQHASLRILLIDLPLLGQLADAETGDAAARKIHDALAFGIRVQLSLHSQLLPVIPVKKLARLPLVFTDEHGLPLVLHAGSVLSYRDVALLSRGRVVVHRKCIVTAMARDAANARNIQLIKQE

SEQ ID NO: 883 - DNA, 633 bp, Salmonella typhimurium LT2
atggataaagagcttctgcaatcaacggtccgtaaagttctcgacgagatgcgccagcggcctattccgctgggcgtctcaaaccgtcatatccacctgtccgcacaggattatgagcggctgtttcccggccatcccatcagcgagaaaaaagcgctgctgcagccgggacaatacgccgcggagcaaaccgtcactctggtgggaccgaaagggcagctcaaaaatgtgcgcctgctcggcccgctgcgctcggtaagccaggtggaaatttcgcgtaccgatgcgagaacgctggggattgccgcgccgctgagaatgtccggcaacctgaaggggacgccgggcatccgcctggtcagcccctttgccgaactggagctgccttccggggttatcgtcgcgcagcggcatatccatatgtcgccgcttgatgcgctgatcctgcgggtttcccacggcgatatggtctccgtggcgattgaaggcgacgatcgcgggctgattttcaacaacgtggcgattcgcgtttcaccggacatgcgcctcgaaatgcacattgataccgatgaagccaacgccgctggtgccgataacccgcatgcctttgcccggctggtaggcccgcgatga

SEQ ID NO: 884 - protein, 210 aa, Salmonella typhimurium LT2
MDKELLQSTVRKVLDEMRQRPIPLGVSNRHIHLSAQDYERLFPGHPISEKKALLQPGQYAAEQTVTLVGPKGQLKNVRLLGPLRSVSQVEISRTDARTLGIAAPLRMSGNLKGTPGIRLVSPFAELELPSGVIVAQRHIHMSPLDALILRVSHGDMVSVAIEGDDRGLIFNNVAIRVSPDMRLEMHIDTDEANAAGADNPHAFARLVGPR

SEQ ID NO: 885 - DNA, 483 bp, Salmonella typhimurium LT2
atggcgaataaggagcaccgcgtgaagcaatcactgggattacttgaagtttgtggtctggcactggctatcagctgcgccgatatcatggcgaaatccgcttctatcacgctgctcgccctcgaaaagaccaatggttcaggctggatggtgattaaaattaccggtgatgtggcctccgttcaggcggctatcaccaccggtgcgcatttcgccgaacagtggaatggcctggtggcccacaaggttatcgccaggcccggagaagggatcctgctcgcagagacaccctccccctccgtcattgaacctgagcctgaagcgtcagagatagctgatgtcgtttctgaagcgccagccgaagaggccccgcaggaatcagaactggtcagctgcaatctgtgtctggatccaaaatgtccgcgccagaagggcgaacctcgtacgctttgcattcattccggcaagcgaggtgaagcgtaa

SEQ ID NO: 886 - protein, 160 aa, Salmonella typhimurium LT2
MANKEHRVKQSLGLLEVCGLALAISCADIMAKSASITLLALEKTNGSGWMVIKITGDVASVQAAITTGAHFAEQWNGLVAHKVIARPGEGILLAETPSPSVIEPEPEASEIADVVSEAPAEEAPQESELVSCNLCLDPKCPRQKGEPRTLCIHSGKRGEA

SEQ ID NO: 887 - DNA, 276 bp, Salmonella typhimurium LT2
atgaataacgcactgggactggttgaaacaaaagggctggtcggcgccattgaagccgccgatgcaatggttaaatccgccaacgtacagctggtgggctacgaaaaaattggttctggcctggtgaccgtcatggttcgcggcgatgtcggcgcggttaaagcagccgtagatgccggcagcgcagcggcaagcgtcgtgggtgaagtgaaatcctgccacgttatcccgcgtccgcacagcgatgttgaggccattttaccgaaatcagcctaa

SEQ ID NO: 888 - protein, 91 aa, Salmonella typhimurium LT2
MNNALGLVETKGLVGAIEAADAMVKSANVQLVGYEKIGSGLVTVMVRGDVGAVKAAVDAGSAAASVVGEVKSCHVIPRPHSDVEAILPKSA

SEQ ID NO: 889 - DNA, 351 bp, Salmonella typhimurium LT2
atggacagtaatcacagcgccccggctatcgtcattaccgttatcaacgactgcgccagcctctggcacgaagtgctgctgggcattgaagaggaaggcatccctttcctgcttcagcatcacccggctggagatatcgttgacagcgcctggcaggcggcgcgcagctcgccgctgctggtcggcattgcctgcgatcgacactcgctggtcgtgcattacaagaatttacccgcatcggcgccgctttttacgctgatgcatcatcaggacagtcaggcccaacgcaacaccggtaataacgcggcacggctggtcaaagggatcccctttcgggatctccatgcttaa

SEQ ID NO: 890 - protein, 116 aa, Salmonella typhimurium LT2
MDSNHSAPAIVITVINDCASLWHEVLLGIEEEGIPFLLQHHPAGDIVDSAWQAARSSPLLVGIACDRHSLVVHYKNLPASAPLFTLMHHQDSQAQRNTGNNAARLVKGIPFRDLHA

SEQ ID NO: 891 - DNA, 1833 bp, Salmonella typhimurium LT2
atgcgatatatagctggcattgacatcggtaactcatcaacggaagtcgcactggcgcggcaagatgagactggcgcactgacgattacacacagcgcgctggcggaaaccaccgggatcaaaggcacgttgcgtaacgtgttcggcattcaggaagcgctcgccctcgtcgcaaagcgcgcggggatcaatgtcagagatatttcgctcatccgcattaacgaagccacgccggtgattggcgatgtggcgatggaaaccattaccgaaaccatcatcaccgaatcgacaatgatcggccataacccaaaaacgccgggcggagcaggccttggtgtgggtatcacgattacgccggaggagctgttaacccgcccggcggactcgtcctatattctggtggtatcgtcagcctttgattttgctgatatcgccaatgttatcaacgcctcaatgcgcgccggataccagattaccggcgtcattttgcagcgcgacgatggcgtactggtcagcaaccggctggaaaaatcgctaccgattgtcgatgaagttctgtacatcgaccgcattccgctggggatgctggcggcgattgaagtcgccgtgccgggaaaggttatcgaaaccctctctaacccttacggcatcgccaccgtatttaatctcaacgccgatgagacaaaaaacatcgtcccgatggcgcgcgcgctgattggcaaccgttccgccgtggtggttaaaacgccatccggcgacgtcaaagcgcgcgcaatacccgccggtaacctggagctgcaggctcagggtcgtaccgtgcgcgtggatgttgccgccggtgccgaagccatcatgaaagcggtggacggttgcggcaagctcgacaacgtcaccggcgaggccgggaccaatatcggcggcatgctggagcacgtgcgccagaccatggccgaactgaccaacaagccgagcagtgagattttcattcaggatctactggccgttgacacctcggttccggtgagcgtcaccggcggtctggccggggagttctcgctggagcaggccgtcggcatcgcctcgatggtgaaatcagaccgtctgcagatggcgatgattgcccgtgaaattgagcagaagcttaatatcgacgtgcagatcggcggcgctgaggctgaagccgccattctgggcgcgctgaccacgccgggtaccacccgaccgctggcgatcctcgacctcggcgcgggctccaccgatgcctccatcatcaaccctaaaggcgaaatcatcgccacccatctcgccggggcaggcgacatggtcacgatgattattgcccgcgaactggggctggaagaccgctatctggcggaagagatcaaaaaatacccgctggctaaggtcgaaagcctgttccacttacgccacgaggacggcagcgtccagttcttcccgacgccgctgcctcccgccgtgttcgcccgcgtctgcgtggtgaaaccggacgaactggtgccgcttcccggcgacttagcgctggaaaaagtgcgcgccattcgccgcagcgctaaagaacgcgtctttgtcaccaacgccctgcgcgcgctgcgccaggtcagtccaaccggcaacattcgcgatattccgttcgtggtgctggtcggcggctcgtcgctggatttcgaagttccgcagctggtcaccgatgcgctggcgcactaccgcctggtcgccgggcgaggaaatattcgcggcagcgaaggcccaagaaacgcggtggccaccggcctgattctctcctggcataaggagtttgcgcatggacagtaa

SEQ ID NO: 892 - protein, 610 aa, Salmonella typhimurium LT2
MRYIAGIDIGNSSTEVALARQDETGALTITHSALAETTGIKGTLRNVFGIQEALALVAKRAGINVRDISLIRINEATPVIGDVAMETITETIITESTMIGHNPKTPGGAGLGVGITITPEELLTRPADSSYILVVSSAFDFADIANVINASMRAGYQITGVILQRDDGVLVSNRLEKSLPIVDEVLYIDRIPLGMLAAIEVAVPGKVIETLSNPYGIATVFNLNADETKNIVPMARALIGNRSAVVVKTPSGDVKARAIPAGNLELQAQGRTVRVDVAAGAEAIMKAVDGCGKLDNVTGEAGTNIGGMLEHVRQTMAELTNKPSSEIFIQDLLAVDTSVPVSVTGGLAGEFSLEQAVGIASMVKSDRLQMAMIAREIEQKLNIDVQIGGAEAEAAILGALTTPGTTRPLAILDLGAGSTDASIINPKGEIIATHLAGAGDMVTMIIARELGLEDRYLAEEIKKYPLAKVESLFHLRHEDGSVQFFPTPLPPAVFARVCVVKPDELVPLPGDLALEKVRAIRRSAKERVFVTNALRALRQVSPTGNIRDIPFVVLVGGSSLDFEVPQLVTDALAHYRLVAGRGNIRGSEGPRNAVATGLILSWHKEFAHGQ

SEQ ID NO: 893 - DNA, 522 bp, Salmonella typhimurium LT2
atgaataccgacgcaattgaatcgatggtccgggacgtattgagccgcatgaacagcctgcagggcgatgcgccagcagcggctcctgcggcaggcggcacgtcccgcagcgcaaaggtcagcgactacccgctggcgaacaaacacccggaatgggtgaaaaccgccaccaataaaacgctggacgactttacgctggaaaacgtgctgagcaataaagtcaccgctcaggatatgcgtattaccccggaaaccctgcgcttacaggcctctatcgccaaagatgcgggtcgcgaccggctggcgatgaacttcgaacgcgccgccgaactgaccgcggtaccggacgatcgcattcttgaaatctacaacgcccttcgtccgtatcgttcaacgaaagaagagctgctcgctatcgccgacgatctcgaaaaccgttatcaggcaaagatttgcgcagctttcgttcgtgaagcggcagggctgtacgttgagcgtaaaaaactcaaaggcgacgattaa

SEQ ID NO: 894 - protein, 173 aa, Salmonella typhimurium LT2
MNTDAIESMVRDVLSRMNSLQGDAPAAAPAAGGTSRSAKVSDYPLANKHPEWVKTATNKTLDDFTLENVLSNKVTAQDMRITPETLRLQASIAKDAGRDRLAMNFERAAELTAVPDDRILEIYNALRPYRSTKEELLAIADDLENRYQAKICAAFVREAAGLYVERKKLKGDD

SEQ ID NO: 895 - DNA, 675 bp, Salmonella typhimurium LT2
atggaaattaatgaaaaattgctgcgccagataattgaagacgtactccgcgatatgaagggcagcgataaacccgtctcgtttaatgcgcctgcggcatccacagcaccacagaccgctgcgcctgcgggcgacggctttctgaccgaagtgggcgaagcgcgccagggcactcagcaggacgaagtcattatcgccgtcggcccggcatttggcctggcgcaaaccgtcaatatcgtcggcttaccgcataagagcattctgcgcgaagtcattgccggtattgaagaagaaggcatcaaggcgcgcgtgattcgctgctttaaatcttccgacgtggcgttcgtcgccgttgaaggtaaccgcctgagcggatccggcatctccatcggcatccagtcgaaaggtactacggttatccaccagcaggggctaccgccgctctccaacctggagctgttcccgcaggcaccgctgctgacgctggaaacctaccgtcagattggtaaaaacgccgcccgctatgcgaaacgagaatcaccgcagccggtccctacgctcaatgaccagatggcacgcccgaagtaccaggcaaagtcggccattttgcatattaaagagaccaagtacgtcgtgacgggcaaaaacccgcaggaactgcgcgtggcgctttga

SEQ ID NO: 896 - protein, 224 aa, Salmonella typhimurium LT2
MEINEKLLRQIIEDVLRDMKGSDKPVSFNAPAASTAPQTAAPAGDGFLTEVGEARQGTQQDEVIIAVGPAFGLAQTVNIVGLPHKSILREVIAGIEEEGIKARVIRCFKSSDVAFVAVEGNRLSGSGISIGIQSKGTTVIHQQGLPPLSNLELFPQAPLLTLETYRQIGKNAARYAKRESPQPVPTLNDQMARPKYQAKSAILHIKETKYVVTGKNPQELRVAL

SEQ ID NO: 897 - DNA, 1665 bp, Salmonella typhimurium LT2
atgagatcgaaaagatttgaagcactggcgaaacgccctgtgaatcaggacggctttgttaaggagtggatcgaagaaggctttatcgcgatggaaagcccgaacgacccaaaaccgtcgataaaaatcgttaacggcgcggtaaccgagctggacggaaaaccggttagcgaattcgacctgatcgaccactttatcgcccgctacggcatcaacctgaaccgcgccgaagaagtgatggcgatggattcggtcaagctggctaacatgctgtgcgatccgaacgtcaagcgcagcgaaatcgttccgctaaccaccgcgatgaccccagcgaaaattgtcgaagtggtttcgcatatgaacgtggttgagatgatgatggcgatgcagaaaatgcgcgcccgccgtactccatctcaacaggcgcacgtcaccaacgttaaagacaacccggtgcaaattgccgccgatgccgccgaaggcgcatggcgcgggtttgacgaacaagagacgacggttgcggtagcgcgctatgcgccgttcaacgccatcgcgctgctggttggttctcaggtaggtcgtccgggggtactgactcaatgctcgctggaagaagccaccgagctgaagctcggcatgctgggccacacctgctacgccgaaaccatctccgtttacggcaccgagccggtcttcaccgacggtgacgataccccatggtcgaagggcttcttagcctcttcctacgcctctcgcggcctgaaaatgcgcttcacctccggctccggctccgaagtgcagatgggctacgccgaaggcaaatccatgctgtatctggaagcgcgctgcatctatatcaccaaagccgcgggcgttcaggggctgcaaaacggctccgtaagctgcatcggcgtaccgtctgccgtgccgtcaggcattcgtgccgtgctggcggaaaacctgatctgctcttcgctggatctggaatgcgcctccagtaacgaccagaccttcacccactccgatatgcgtcgtaccgctcgcctgctgatgcagttcctgccgggtaccgactttatctcctccggttattccgcggtgccgaactacgacaacatgttcgccggttccaacgaagatgcggaagactttgacgactacaacgttatccagcgtgacctgaaagtggacggcggtctgcgcccggttcgcgaagaggacgttatcgccatccgtaacaaagccgcccgcgcgctgcaggccgtgtttgccggaatgggactgccgccgattaccgatgaagaagttgaagccgcgacctatgcccacggttcgaaagatatgccggagcgcaacatcgtcgaagacatcaagttcgcccaggaaatcatcaataaaaaccgcaacggtctggaagttgtgaaagcgctggctcagggcgggtttaccgacgtggcccaggacatgctcaacatccagaaagccaagctaaccggcgactatttgcacacctccgccattatcgtcggcgacggacaagtgctctctgcggttaatgacgtcaatgactatgccggtccggcaacaggttatcgcctgcagggagaacgctgggaagagattaaaaacatccctggcgctcttgatcccaacgagattgattaa

SEQ ID NO: 898 - protein, 554 aa, Salmonella typhimurium LT2
MRSKRFEALAKRPVNQDGFVKEWIEEGFIAMESPNDPKPSIKIVNGAVTELDGKPVSEFDLIDHFIARYGINLNRAEEVMAMDSVKLANMLCDPNVKRSEIVPLTTAMTPAKIVEVVSHMNVVEMMMAMQKMRARRTPSQQAHVTNVKDNPVQIAADAAEGAWRGFDEQETTVAVARYAPFNAIALLVGSQVGRPGVLTQCSLEEATELKLGMLGHTCYAETISVYGTEPVFTDGDDTPWSKGFLASSYASRGLKMRFTSGSGSEVQMGYAEGKSMLYLEARCIYITKAAGVQGLQNGSVSCIGVPSAVPSGIRAVLAENLICSSLDLECASSNDQTFTHSDMRRTARLLMQFLPGTDFISSGYSAVPNYDNMFAGSNEDAEDFDDYNVIQRDLKVDGGLRPVREEDVIAIRNKAARALQAVFAGMGLPPITDEEVEAATYAHGSKDMPERNIVEDIKFAQEIINKNRNGLEVVKALAQGGFTDVAQDMLNIQKAKLTGDYLHTSAIIVGDGQVLSAVNDVNDYAGPATGYRLQGERWEEIKNIPGALDPNEID

SEQ ID NO: 899 - DNA, 702 bp, Salmonella typhimurium LT2
atggcagaaaaaagctgcagtttaacggaatttgtcgggaccgccattggcgataccctgggcctggttatcgccaacgtcgataccgccctgctggacgcgatgaaacttgagaagcgctatcgttccatcggcattctcggcgcccgcaccggcgcaggcccgcacattatggcggcggacgaagcggtgaaagccaccaacaccgaagtggtcagcattgagctgccgcgcgataccaaaggcggcgcgggccacggttcgctgattattttaggcggtaacgacgtttccgacgtcaagcgcggtatcgaagtcgcgctgaaagagctggaccgcaccttcggtgatgtttacggcaacgaagccggacatatcgagctgcagtacaccgctcgcgccagctatgcgctggaaaaagcgttcggcgcgccgattggccgcgcctgcggcattatcgtcggcgctccggcttccgtcggcgtactgatggccgataccgcgctgaagtcagccaacgttgaagtcgtggcgtacagctctccggcgcacggcaccagctttagtaacgaagctattctggtgatttccggcgactccggcgcggtccgtcaggcggtgacctccgcccgcgaaatcggcaaaaccgtccttgcgaccctcggttctgaaccgaaaaacgatcgtccgtcctacatctga

SEQ ID NO: 900 - protein, 233 aa, Salmonella typhimurium LT2
MAEKSCSLTEFVGTAIGDTLGLVIANVDTALLDAMKLEKRYRSIGILGARTGAGPHIMAADEAVKATNTEVVSIELPRDTKGGAGHGSLIILGGNDVSDVKRGIEVALKELDRTFGDVYGNEAGHIELQYTARASYALEKAFGAPIGRACGIIVGAPASVGVLMADTALKSANVEVVAYSSPAHGTSFSNEAILVISGDSGAVRQAVTSAREIGKTVLATLGSEPKNDRPSYI

SEQ ID NO: 901 - DNA, 285 bp, Salmonella typhimurium LT2
atgcaacaagaagcactaggaatggtagaaaccaaaggcttaaccgcagccatagaggccgctgatgcaatggttaagtcagccaatgtgatgttagtgggctatgaaaagattggctccgggctggtaaccgtcatcgtgcgcggcgatgttggcgcggtcaaagcggccaccgatgcaggtgccgcagccgcacgcaacgtgggtgaagtgaaagccgtacacgtcatcccacgccctcacaccgatgtagaaaaaatcttaccgaagggaattagccaatga

SEQ ID NO: 902 - protein, 94 aa, Salmonella typhimurium LT2
MQQEALGMVETKGLTAAIEAADAMVKSANVMLVGYEKIGSGLVTVIVRGDVGAVKAATDAGAAAARNVGEVKAVHVIPRPHTDVEKILPKGISQ

SEQ ID NO: 903 - DNA, 1053 bp, Salmonella typhimurium LT2
atgaaaaagacccgtacagcgaatttgcaccatctttatcatgaagcgttacccgaagacgttaaacttacgcccagagtcgaggtggacaatgttcatcagcgacggacgacggatgtctatgaacatgctctgactatcaccgcctggcagcagatctacgatcagttacacccgggtaaatttcatggcgagttcacggaaatcctgcttgatgagattcaggtgttccgtgaatacaccggcctggcgctgcgtcagtcgtgtctggtttggccaaactctttctggtttggtattccggcgacgcgcggcgaacagggatttatcggcgcgcaggggctcggcagcgccgagattgccacccgaccgggaggcaccgagtttgaactgagcacgccggatgattacaccattctgggcgtcgttatctcggaagatgttatttcccgtcaggccacgtttttgcataacccggaaagggtgctgcatatgctgcgtaaccagctagcgctggaggtaaaagagcagcataaagcagcgctgtggggctttgtgcagcaggcgctggccaccttcagcgagagtcctgaaactctgcatcaacctgcggtgcgtaaggtcttgagtgataatttattgctggcgatgggcacgatgctggaagaggcgaagccgattcatagcgccgaaagcatcagccatcagggatatcgtaggctactgtcgcgggcgcgggaatatgtgctggaaaatatgtcggagccgctgacggtgctcgacttatgtaaccagctacacgtaagccgtcgcacgctgcaaaatgcgtttcacgccattttgggcattggccccaatgcgtggctgaaacgtattcgcttaaacgcagtacgccgggaactgattagcccgtggtcgcagagcgccacggtcaaagatgccgcgatgcagtggggattctggcatctggggcaatttgccaccgattatcagcaattatttgccgaaaaaccgtcgttgacgctgcatcaacggatgcggcaatgggcttga

SEQ ID NO: 904 - protein, 350 aa, Salmonella typhimurium LT2
MKKTRTANLHHLYHEALPEDVKLTPRVEVDNVHQRRTTDVYEHALTITAWQQIYDQLHPGKFHGEFTEILLDEIQVFREYTGLALRQSCLVWPNSFWFGIPATRGEQGFIGAQGLGSAEIATRPGGTEFELSTPDDYTILGVVISEDVISRQATFLHNPERVLHMLRNQLALEVKEQHKAALWGFVQQALATFSESPETLHQPAVRKVLSDNLLLAMGTMLEEAKPIHSAESISHQGYRRLLSRAREYVLENMSEPLTVLDLCNQLHVSRRTLQNAFHAILGIGPNAWLKRIRLNAVRRELISPWSQSATVKDAAMQWGFWHLGQFATDYQQLFAEKPSLTLHQRMRQWA

SEQ ID NO: 905 - DNA, 336 bp, Salmonella typhimurium LT2
atgaataaagaacgcattattcaggaatttgtgccgggcaaacaggtcacgctggcgcatctcattgcgcaccctggtgaagaactggcgaaaaagatcggcgttcccgatgctggcgcgattggcattatgactttaacgccgggggaaacggcgatgatcgctggcgatttagcgatgaaggctgcggatgtacacatcggttttctcgatagatttagcggcgcgctggtgatttatggcaccgtcggcgcagtagaagaagcgctattacagacggtcagcgggctggggcgattattaaactttaccctgtgtgagttaacaaaaagttaa

SEQ ID NO: 906 - protein, 111 aa, Salmonella typhimurium LT2
MNKERIIQEFVPGKQVTLAHLIAHPGEELAKKIGVPDAGAIGIMTLTPGETAMIAGDLAMKAADVHIGFLDRFSGALVIYGTVGAVEEALLQTVSGLGRLLNFTLCELTKS

SEQ ID NO: 907 - DNA, 480 bp, Salmonella typhimurium LT2
atgaaacgtattgcttttgtcggcgcggtcggtgccggaaaaacaacgctttttaacgcgttacggggaaattattccctcgccagaaaaacgcaggccgtggaatttaatgatcatggcgatatcgatacgccgggtgaatattttagccatccccgttggtatcacgccttaattaccacgttgcaggatgtggacacgctgatttatgtccacgcggcaaacgataaagaaagtcgcttacctgccgggttattggatgttggaacccgtaaacgacatatcgccgttatcagcaaaacggacatgccggatgccgacgtcgccgctacgcggcagttgctttgcgagattggattccgggagccgattttcgagctcaacggccacgacccgcaaagcgtgcggcagttggtggattatctggcggctctcagtgaacaggaggaagaggcaggtgaaaaaacttatcacagctaa

SEQ ID NO: 908 - protein, 159 aa, Salmonella typhimurium LT2
MKRIAFVGAVGAGKTTLFNALRGNYSLARKTQAVEFNDHGDIDTPGEYFSHPRWYHALITTLQDVDTLIYVHAANDKESRLPAGLLDVGTRKRHIAVISKTDMPDADVAATRQLLCEIGFREPIFELNGHDPQSVRQLVDYLAALSEQEEEAGEKTYHS

SEQ ID NO: 909 - DNA, 690 bp, Salmonella typhimurium LT2
gtgaaaaaacttatcacagctaacgatattcgtgcggcccacgcccgcggcgaacaggcgatgtcggtagtgctgcgcgccagcattattaccccggaggctcgcgaagtggcggaactactgggcttcacgattaccgaatgcgacgagtccgttccggcatccacatcggcgcaggcgtgtaaaagcgaaagccagcgcattcgggaagccatcatcgcgcagctcccggaagggcagtttactgaaagcctggtggcgcagttgatggaaaaagtgctgaaggaaaagcagtcgctggaactggggacgatgcagccgagctttacctccgtcacgggtaaaggcggcgtgaaagtcattgacggcagcagcgtgaaatttggccgcttcgacggcgccgaaccgcactgcgtcggcttaaccgatctggttacagagcaggatggtagcagcatggccgccgggtttatgcagtgggacaacgcctttttcccgtggacgctgaactacgacgaaatcgacatggtgctggaaggcgaactgcacgtacgccatgaaggcgaaaccatgattgccaaagccggagatgtgatgttcatccctaaaggctccagcattgaatttggcacgccaacgtccgtgcgctttctgtacgtcgcctggcctgcaaactggcaatccgtatga

SEQ ID NO: 910 - protein, 229 aa, Salmonella typhimurium LT2
MKKLITANDIRAAHARGEQAMSVVLRASIITPEAREVAELLGFTITECDESVPASTSAQACKSESQRIREAIIAQLPEGQFTESLVAQLMEKVLKEKQSLELGTMQPSFTSVTGKGGVKVIDGSSVKFGRFDGAEPHCVGLTDLVTEQDGSSMAAGFMQWDNAFFPWTLNYDEIDMVLEGELHVRHEGETMIAKAGDVMFIPKGSSIEFGTPTSVRFLYVAWPANWQSV

SEQ ID NO: 911 - DNA, 804 bp, Salmonella typhimurium LT2
atgaacgatttcatcaccgaaacgtggctcagagcgaatcatacgctcagcgaaggatcggagatccatctgcccgctgacgcacgactgacgccctcggcccgggaactgctggaaagtcgccgtctgcgcattaagtttctggatccgcaaggccggctgtttgtcgatgatgacgaacagcagccgcagccggtacatggcttaaccagtagcgatacgcacccacaggcctgctgtgaactgtgccgccagccggtggtgaaaaagcccgatacgctgacccatctgacggcggacaaaatggtcgccaaaagcgacccgcgcctcggctttcgcgccgcgctcgacagcgccatcgcgctgaccgtgtggctacaaatcgaactggcggaaccctggcagccgtggcttttcgatatccgctcgcggctgggcaacattatgcgcgccgacgctatagatgaaccgctggcggcgcagtctatcgtcggactgaacgaggatgagctgcatcgcctttcccaccagccgctgcgctacctcgaccacgatcacctggtgccggaggccagccacggtcgcgatgcggcgctgcttaatctgctgcgaaccaaagtccgcgaaacagaaaccctcgccgcacaagtgtttattacccgtagttttgaggtcttgcgcccggacattttacaggcgctgaaccgtctctccagtacggtttacgtgatgatgattttgagcgtggcgaaacatccgctgacggtcgcccaaattcaacaacggttgggagagaagccatga

SEQ ID NO: 912 - protein, 267 aa, Salmonella typhimurium LT2
MNDFITETWLRANHTLSEGSEIHLPADARLTPSARELLESRRLRIKFLDPQGRLFVDDDEQQPQPVHGLTSSDTHPQACCELCRQPVVKKPDTLTHLTADKMVAKSDPRLGFRAALDSAIALTVWLQIELAEPWQPWLFDIRSRLGNIMRADAIDEPLAAQSIVGLNEDELHRLSHQPLRYLDHDHLVPEASHGRDAALLNLLRTKVRETETLAAQVFITRSFEVLRPDILQALNRLSSTVYVMMILSVAKHPLTVAQIQQRLGEKP

SEQ ID NO: 913 - DNA, 1017 bp, Salmonella typhimurium LT2
atgatcattgaacgcgcccgcgaactggcggtacgcgcccccgccagagtcgtctttcctgatgcgctggacgaacgcgtgctgaaagcggcgcattacctgcaacagtacggtctggctcgccccgttctggtcgccagtccgtttgcgctgcgtcagtttgccctgagtcatcgtatggcgatggatggcattcaggtcatcgacccacacagcaacctgagtatgcgccagcgttttgcgcaacgctggcttgcccgtgccggagaaaaaacgccgccggacgcagtggaaaagcttagcgatccgctgatgttcgctgccgccatggtgagcgccggtgaggctgatgtgtgtatcgcaggcaacctgtcgtcaacggcgaacgtgctgcgcgcagggctgcgggtgattggcctgcaacccgggtgcaaaacattgtcgtctattttcctgatgctgccgcagtatgccggtccggcattagggttcgccgattgcagcgtagtgccgcagccgacggcggcgcagctggcggatatcgctctcgccagcgccgacacctggcgggccattaccggcgaagagccgcgcgtggcgatgctgtcattttcaagcaacggcagcgcccgtcaccccaatgttgccaacgtgcagcaggcgacagagctcgttcgcgaacgtgcgccgcaactgcttgtggacggtgaattgcagtttgacgccgctttcgtgccggaggtcgccgcgcaaaaagcgcctgacagcccgctgcaaggccgcgccaacgtgatgattttcccgtcgctggaggcgggcaatattggctacaaaatcactcagcgtctgggaggctatcgcgctgttgggccgctaattcaggggcttgccgcgccgcttcacgacctctcccgaggctgtagcgtgcaggaaattatcgaactggcgttggtggcagccgtgccgcgccaggctgacgtgagccgcgaacgcagcttacacacactggttgaatga

SEQ ID NO: 914 - protein, 338 aa, Salmonella typhimurium LT2
MIIERARELAVRAPARVVFPDALDERVLKAAHYLQQYGLARPVLVASPFALRQFALSHRMAMDGIQVIDPHSNLSMRQRFAQRWLARAGEKTPPDAVEKLSDPLMFAAAMVSAGEADVCIAGNLSSTANVLRAGLRVIGLQPGCKTLSSIFLMLPQYAGPALGFADCSVVPQPTAAQLADIALASADTWRAITGEEPRVAMLSFSSNGSARHPNVANVQQATELVRERAPQLLVDGELQFDAAFVPEVAAQKAPDSPLQGRANVMIFPSLEAGNIGYKITQRLGGYRAVGPLIQGLAAPLHDLSRGCSVQEIIELALVAAVPRQADVSRERSLHTLVE

SEQ ID NO: 915 - DNA, 291 bp, Salmonella typhimurium LT2
atggaagcattaggaatgattgaaacccggggcctggttgcgctgattgaggcctccgatgcgatggtaaaagccgcgcgcgtgaagctggtcggcgtgaagcagattggcggtggcctgtgtactgccatggtgcgtggcgatgtggcggcgtgcaaagccgcaaccgatgctggcgccgctgcggcgcagcgcattggcgagttggtctccgtacacgtgattccacgcccgcacggcgatctggaagaagtgttcccgatcagcttcaaaggcgacagcaacatttga

SEQ ID NO: 916 - protein, 96 aa, Salmonella typhimurium LT2
MEALGMIETRGLVALIEASDAMVKAARVKLVGVKQIGGGLCTAMVRGDVAACKAATDAGAAAAQRIGELVSVHVIPRPHGDLEEVFPISFKGDSNI

SEQ ID NO: 917 - DNA, 300 bp, Salmonella typhimurium LT2
atggaggcggatatgaaactggcagtcgtcacaggacaaatcgtatgtaccgtccgccatcagggactggcgcatgacaaattgctgatggtggaaatgatcgatgcccagggcaaccccgacgggcagtgtgccgtcgctatcgacagtatcggggcgggaaccggagagtgggtactgctggtcagcggcagttccgcacgccaggcgcatcgcagcgaattatcaccggtcgatctgtgcgtcattggcatcgtcgatgaagtggtggctggcgggaaagtggttttccataaatag

SEQ ID NO: 918 - protein, 99 aa, Salmonella typhimurium LT2
MEADMKLAVVTGQIVCTVRHQGLAHDKLLMVEMIDAQGNPDGQCAVAIDSIGAGTGEWVLLVSGSSARQAHRSELSPVDLCVIGIVDEVVAGGKVVFHK

SEQ ID NO: 919 - DNA, 1404 bp, Salmonella typhimurium LT2
atgaatcaacaggatattgaacaggtggtgaaagcggtactgctgaaaatgaaagacagcagccagccggccagtactgttcatgagatgggcgtttttgcctccctggatgacgcagtggcggcagcaaaacgggcccagcaggggctgaagagcgtggcgatgcgccagcttgccattcatgccattcgcgaagcgggcgaaaaacacgcccgagaattagcggaacttgccgtcagcgaaaccggcatgggacgcgttgacgataaatttgccaaaaacgtggcgcaggcgcgcggcacgccgggcgtcgagtgtttatctccgcaggtgctgaccggcgataacggcctgacgctgattgaaaatgcaccgtggggcgtggtggcctcggtcacgccgtccaccaatccggcggcgacggtgattaataacgccatcagcctgattgccgcaggcaacagcgtcgtgtttgccccgcatccggcggcgaaaaaggtctctcagcgggcaatcactctcctcaatcaggcggtggtcgccgccggtggtccggaaaatttgctggtcaccgtggcgaacccggatatcgaaaccgcccagcggttgttcaaatatcccggtattggcctgctggtggtgactggcggcgaagcggtggtggacgcggcgcgtaaacatactaataaacgcctgatcgccgccggtgccggcaatcccccggtggtggtggatgagaccgccgacctgccgcgcgctgcacaatccatcgtcaaaggcgcgtcgtttgataacaacatcatctgtgccgacgaaaaagtgctgattgtggtggatagcgtcgccgacgagctgatgcgtctgatggaaggtcagcacgcggtgaaactgaccgccgctcaggccgaacagctccagccggtgctgctgaagaatatcgatgaacgcggcaaaggcaccgtcagccgtgactgggtcggtcgtgacgcgggcaagatcgccgcagccatcggcctgaacgtcccggatcaaacgcgcctgctgtttgtggaaacgcccgccaaccatccgtttgccgttactgaaatgatgatgccggtactgccggtggtgcgggtcgccaacgtcgaagaagccatcgccctggcggttcagcttgaaggcggttgccaccatacggcggcgatgcactcgcgcaatatcgacaacatgaaccagatggcgaacgccatcgacaccagcattttcgtcaaaaacgggccgtgcattgccgggcttggattgggcggagaaggctggaccaccatgactatcactacgccaaccggcgaaggggtgaccagcgcgcgtacctttgtgcggctgcgtcgatgcgtgctggtggatgcgtttcgcattgtataa

SEQ ID NO: 920 - protein, 467 aa, Salmonella typhimurium LT2
MNQQDIEQVVKAVLLKMKDSSQPASTVHEMGVFASLDDAVAAAKRAQQGLKSVAMRQLAIHAIREAGEKHARELAELAVSETGMGRVDDKFAKNVAQARGTPGVECLSPQVLTGDNGLTLIENAPWGVVASVTPSTNPAATVINNAISLIAAGNSVVFAPHPAAKKVSQRAITLLNQAVVAAGGPENLLVTVANPDIETAQRLFKYPGIGLLVVTGGEAVVDAARKHTNKRLIAAGAGNPPVVVDETADLPRAAQSIVKGASFDNNIICADEKVLIVVDSVADELMRLMEGQHAVKLTAAQAEQLQPVLLKNIDERGKGTVSRDWVGRDAGKIAAAIGLNVPDQTRLLFVETPANHPFAVTEMMMPVLPVVRVANVEEAIALAVQLEGGCHHTAAMHSRNIDNMNQMANAIDTSIFVKNGPCIAGLGLGGEGWTTMTITTPTGEGVTSARTFVRLRRCVLVDAFRIV

SEQ ID NO: 921 - DNA, 840 bp, Salmonella typhimurium LT2
atggcgcacgacgaacaactctggctcaccccaagactgcaaaaagcggcggccctgtgtaaccagacgcccgccgccagcgatacaccgctgtggctgggcgtcgatttgggcacctgcgacgtggtgtcgatggtggtcgacggcaacgcccagccggtggcggtatgccttgactgggccgacgttgtgcgtgacggcatcgtctgggatttcttcggcgccgtcaccctcgtgcgccgccatctcgacacccttgaacagcagctcggctgccgctttacccacgcggcgacctcgtttccgccaggcaccgacccgcgtatttcgatcaacgtgctggagtctgccgggttagaagtcagccatgtactggatgaaccgacggcggtagcggatctgctggcgcttgataatgcaggcgtggtggatattggcggcggcactaccggcattgccatcgtcaaacagggcaaggtgacttactccgccgatgaagccactggcgggcaccatatctccctgacgctggcgggcaaccgccgtattcccctggaagaggcggaacagtacaagcgcagcaatgcgcaggagatttggccggtagtgaagccggtgtacgaaaagatggcggaaatcgttgctcgccacattgaagggcaaggaattgctgatttatggctggcgggcggctcctgtatgcagccgggcgtggaggcgttatttcgccagcgtttcccggagttacaggtgcatttgccgcagcacagcctgtttatgaccccgctggcgatagccaacagcgggagagcgaaagcggagggactctatgcaagctga

SEQ ID NO: 922 - protein, 279 aa, Salmonella typhimurium LT2
MAHDEQLWLTPRLQKAAALCNQTPAASDTPLWLGVDLGTCDVVSMVVDGNAQPVAVCLDWADVVRDGIVWDFFGAVTLVRRHLDTLEQQLGCRFTHAATSFPPGTDPRISINVLESAGLEVSHVLDEPTAVADLLALDNAGVVDIGGGTTGIAIVKQGKVTYSADEATGGHHISLTLAGNRRIPLEEAEQYKRSNAQEIWPVVKPVYEKMAEIVARHIEGQGIADLWLAGGSCMQPGVEALFRQRFPELQVHLPQHSLFMTPLAIANSGRAKAEGLYAS

SEQ ID NO: 923 - DNA, 1188 bp, Salmonella typhimurium LT2
atgcaagctgaactacagacggcgctgtttcaggcattcgacaccctgaatctgcaacgggtgaaaacgttcagcgtaccgccggtcacgctgtgcggacttggggcgctcggcgcctgtggacaggaagcgcaagcgcgaggcgtaagccatctgtttgtgatggtcgacagcttcctgcatcaggcgggaatgaccgcgccgctggcacgcagcctggcgatgaagggcgtggcgatgacggtctggccgtgtccgcctggcgagccgtgcatcaccgatgtctgcgcggcggtggcgcaactgcgtgaggcggcgtgcgacggcgtagtggcctttggcggcggttcggtgctggacgcggcgaaagcggtcgccctgctggtgactaaccctgaccagacgctgagcgccatgaccgagcacagtacattacgcccgcgtctgccgctgattgcggtgccgaccaccgccggaaccggttctgaaaccaccaacgtaacggtgattatcgacgcggtcagcgggcgcaagcaggtgctggcgcacgcgtcactaatgccggacgtggcgattcttgatgctgccgtgaccgaaggcgttccgccaaacgtgacggcgatgaccggtatcgatgcgttgacgcatgcgattgaggcctacagcgcgctcaacgccacgccgtttaccgacagcctggcgattggcgcgatagcgatgattggcaaatcgctgccgaaagccgtgggttacggccacgatctggcggcgcgtgaaaatatgttgctggcctcctgtatggcgggaatggccttttccagcgccggtctggggctgtgtcatgcgatggcgcaccagcctggggcggcgctgcatattccgcacggccaggccaacgccatgctgctgccaacagtcatgggctttaaccggatggtttgccgcgagcgcttcagtcaaataggtcgggcgttaaccaataagaaatcggacgatcgcgatgcgattgcggcggtgtgcgagctgattgccgaagtgggacagagcaaacggctggctgacgctggcgccaaacccgaacactacagcgcgtgggcgcaagccgcgctggaggatatttgtctgcgcagtaacccacgcaccgccacacaggcacagattatcgacctgtacgcggctgccgggtaa

SEQ ID NO: 924 - protein, 395 aa, Salmonella typhimurium LT2
MQAELQTALFQAFDTLNLQRVKTFSVPPVTLCGLGALGACGQEAQARGVSHLFVMVDSFLHQAGMTAPLARSLAMKGVAMTVWPCPPGEPCITDVCAAVAQLREAACDGVVAFGGGSVLDAAKAVALLVTNPDQTLSAMTEHSTLRPRLPLIAVPTTAGTGSETTNVTVIIDAVSGRKQVLAHASLMPDVAILDAAVTEGVPPNVTAMTGIDALTHAIEAYSALNATPFTDSLAIGAIAMIGKSLPKAVGYGHDLAARENMLLASCMAGMAFSSAGLGLCHAMAHQPGAALHIPHGQANAMLLPTVMGFNRMVCRERFSQIGRALTNKKSDDRDAIAAVCELIAEVGQSKRLADAGAKPEHYSAWAQAALEDICLRSNPRTATQAQIIDLYAAAG

SEQ ID NO: 925 - DNA, 1227 bp, Salmonella typhimurium LT2
atgggaattaacgaaatcatcatgtacatcatgatgttctttatgctgattgccgccgtggacagaatcctgtcgcagttcggcgggtcggcgcgcttcctcggtaaattcggcaagagtatcgaggggtctggcggccagtttgaagagggctttatggcgatgggcgcgctggggctggcgatggtcggtatgaccgcgctggcgccggtgctggcgcatgtactggggccggttattatcccggtatacgaaatgctgggcgcgaacccatccatgttcgcgggtacgctgctggcctgtgatatgggcggattcttcctcgccaaagagctggccggcggtgatgtcgcggcgtggctatactcagggttaatacttgggtcgatgatggggccgaccattgtgttctccattccggtggcgctcggcattatcgaaccgtctgaccgccgctacctggcgcttggcgtactggcgggtatcgtcaccattcccattggctgcattgcggggggactgatcgccatgtactcaggtgtgcagatcaatggtcagccagtggagtttaccttcgcgctgatcctgatgaacatgatcccggtattgatcgtcgcggtgctggtagcgctggggctgaagttcatcccggaaaaaatgatcaacggtttccagatcttcgccaaatttctggtagcgctgatcaccatcggtctggcagctgcggtggttaaattcctgttgggttgggagttgattccgggactcgacccgatctttatggcgccaggcgacaaacccggcgaagtgatgcgcgccattgaagtgatcggctctatctcctgcgtgctgcttggcgcgtatccgatggtgctgttactgacccgctggtttgaaaaaccgttgatgaatgtcggtaaactgctgaacgtcaataatattgcggcggcaggcatggtggcgaccctggcgaacaatatccccatgttcggcatgatgaagcagatggatacccgcggcaaagtgattaactgcgcatttgccgtctctgcggcgttcgcgctgggcgaccatttaggcttcgccgctgccaacatgaacgccatgatcttcccgatgattgtcggcaagctgatcggcggcgtgacggcgattggcgtggcgatgatgctggtgccgaaagatgacgccgcccaggtgaaaaccgaagcggaggcgcaatcgtga

SEQ ID NO: 926 - protein, 408 aa, Salmonella typhimurium LT2
MGINEIIMYIMMFFMLIAAVDRILSQFGGSARFLGKFGKSIEGSGGQFEEGFMAMGALGLAMVGMTALAPVLAHVLGPVIIPVYEMLGANPSMFAGTLLACDMGGFFLAKELAGGDVAAWLYSGLILGSMMGPTIVFSIPVALGIIEPSDRRYLALGVLAGIVTIPIGCIAGGLIAMYSGVQINGQPVEFTFALILMNMIPVLIVAVLVALGLKFIPEKMINGFQIFAKFLVALITIGLAAAVVKFLLGWELIPGLDPIFMAPGDKPGEVMRAIEVIGSISCVLLGAYPMVLLLTRWFEKPLMNVGKLLNVNNIAAAGMVATLANNIPMFGMMKQMDTRGKVINCAFAVSAAFALGDHLGFAAANMNAMIFPMIVGKLIGGVTAIGVAMMLVPKDDAAQVKTEAEAQS

SEQ ID NO: 927 - DNA, 1404 bp, Salmonella typhimurium LT2
gtgaacactcgccagctactgagcgtcggtatcgatatcggcaccaccaccacgcaggtgatcttctcgcgcctggagttggttaaccgtgcggcggtgtcgcaggtgccgcgctacgaattcatcaaacgcgacattagctggcaaagcccggtcttctttacgcccgtggataagcagggcggtctgaaagaggtagaacttaaagcgctgattctggcccagtatcaggccgcaggcatcgcgcctgaatcggtggactcaggggctatcattatcaccggcgaaagcgccaaaacccgcaacgcccgtccggcggtcatggcgctctcgcagtcgctgggcgactttgtggtcgccagcgccgggccgcatctggaatcggtcattgccggtcacggcgccggagcgcaaagcttgtctgagcagcggatgtgccgggtgctgaatattgatatcggcggcggcacgtctaactacgcgctgtttgacgcgggaaaagtcagcggcaccgcctgccttaacgtcggtggtcgcctgctggaaaccgatgctcaggggcgcgtggtttatgcccatcagccggggcagatgattatcgatgaggtgttcggttcgggtactgatgctcgcgccttagctgccgcacagttgggacaggtggcgcggcggatggcggatctcatcgtcgaggttatcactggcgcgctctcgccgctggcgcaatcgctgatgcaaaccgggctgctgcccgccgatattacgccggaggtgatcaccctttccggtggggtaggtgaatgctaccgcaaccaacctgccgatccgttctgcttttctgatatcgggccgctgctggcgaccgcgctgcatgagcacccgcgtctgcgcgagatgaacgtgcagtttccggcgcaaaccgtgcgcgccacggtgattggcgcgggggcccatacgctctcgctttccggcagtactatctggctggaagacgtccaactgccgctgcgcaacctgccggtggcgatcccgcaggatgacgccgatctggtgaacgcctggcggcaggcgcttctccagcttgatctcgacccgcaaaccgacgcttacgtgctggcgcttcccgccacgcttccggtgcgttacgccgcattactcacggtcatcaacgcgctgacggcttttgtcgcgcgttatcccaatccacatcccctgctggtggtggccgagcaggattttggtaaagcgctgggcatgttattgcgcccacagttaccgcaacttccgctggcggtcatcgatgaggtggtcgtgcgggcgggagactatatcgacattggtacgcctctttttggcggatcggttgtgccggtgacggtgaaatcactcgcatttccttcctga

SEQ ID NO: 928 - protein, 467 aa, Salmonella typhimurium LT2
MNTRQLLSVGIDIGTTTTQVIFSRLELVNRAAVSQVPRYEFIKRDISWQSPVFFTPVDKQGGLKEVELKALILAQYQAAGIAPESVDSGAIIITGESAKTRNARPAVMALSQSLGDFVVASAGPHLESVIAGHGAGAQSLSEQRMCRVLNIDIGGGTSNYALFDAGKVSGTACLNVGGRLLETDAQGRVVYAHQPGQMIIDEVFGSGTDARALAAAQLGQVARRMADLIVEVITGALSPLAQSLMQTGLLPADITPEVITLSGGVGECYRNQPADPFCFSDIGPLLATALHEHPRLREMNVQFPAQTVRATVIGAGAHTLSLSGSTIWLEDVQLPLRNLPVAIPQDDADLVNAWRQALLQLDLDPQTDAYVLALPATLPVRYAALLTVINALTAFVARYPNPHPLLVVAEQDFGKALGMLLRPQLPQLPLAVIDEVVVRAGDYIDIGTPLFGGSVVPVTVKSLAFPS

SEQ ID NO: 929 - DNA, 1362 bp, Salmonella typhimurium LT2
atgaaactaaagaccacattgttcggcaatgtttatcagtttaaggatgtaaaagaggtactggctaaagccaacgaactgcgttcgggggatgtgctggccggggttgccgcggcaagttcgcaggagcgcgtagcggcaaaacaggtactgtcggaaatgacggtggcggatatccgcaacaatccggtgattgcctatgaagaggactgcgtgacgcgcctgattcaggacgacgtcaacgaaacggcctataaccggattaaaaactggagcatcagcgaactgcgtgaatacgtgctgagcgatgaaacctccgtggacgacatcgcgtttacccgcaaaggcctgacctccgaagtggtggcggcagtagcgaaaatctgctccaacgctgacctgatctacggcggcaagaaaatgccggtgatcaaaaaagccaataccaccatcggtattccgggcacctttagctgccgtttgcagccgaacgatacccgtgacgatgtacagagtatcgccgcgcaaatctacgaagggctttctttcggcgcaggcgatgcggtgatcggcgttaacccggtgaccgatgacgtggagaacctgacccgcgtgctcgacaccgtttacggcgttatcgataaattcaatattccgacccagggctgcgtgctggcgcacgtcaccacccagatcgaagcgattcgtcgcggcgcgccgggcggactgattttccagagcatttgcggcagcgagaagggcttaaaagagttcggcgtcgagctggccatgctcgacgaagcgcgggctgtgggggcggagttcaaccgcatcgccggggaaaactgcctgtactttgaaaccgggcaagggtctgcgctctccgcaggcgcgaactttggtgccgaccaggtgacgatggaagcgcgtaactacgggctggcgcgccactacgatccgttcctggtgaacaccgtggtgggctttatcgggccggagtatctctacaacgacaggcagattatccgcgccggtctcgaagatcactttatgggcaagctgagcggcatctcgatgggctgcgactgctgctataccaaccatgccgacgccgaccagaaccttaacgaaaacctgatgattctgctcgccactgccggctgtaactacatcatggggatgccgctcggcgacgacatcatgctcaactaccagaccaccgctttccacgataccgccaccgtccgtcagttgctgaatttacggccgtcgccggagtttgaacgctggctggaaacgatgggcattatggcaaacggtcgtctgaccaaacgggcgggcgatccgtcactgttcttctga

SEQ ID NO: 930 - protein, 453 aa, Salmonella typhimurium LT2
MKLKTTLFGNVYQFKDVKEVLAKANELRSGDVLAGVAAASSQERVAAKQVLSEMTVADIRNNPVIAYEEDCVTRLIQDDVNETAYNRIKNWSISELREYVLSDETSVDDIAFTRKGLTSEVVAAVAKICSNADLIYGGKKMPVIKKANTTIGIPGTFSCRLQPNDTRDDVQSIAAQIYEGLSFGAGDAVIGVNPVTDDVENLTRVLDTVYGVIDKFNIPTQGCVLAHVTTQIEAIRRGAPGGLIFQSICGSEKGLKEFGVELAMLDEARAVGAEFNRIAGENCLYFETGQGSALSAGANFGADQVTMEARNYGLARHYDPFLVNTVVGFIGPEYLYNDRQIIRAGLEDHFMGKLSGISMGCDCCYTNHADADQNLNENLMILLATAGCNYIMGMPLGDDIMLNYQTTAFHDTATVRQLLNLRPSPEFERWLETMGIMANGRLTKRAGDPSLFF

SEQ ID NO: 931 - DNA, 897 bp, Salmonella typhimurium LT2
atggatcaaaaacagattgaagaaattgtacgtagcgtgatggcgtcaatgggacaggacgtaccgcagcccgccgcgccgtcaacgcaggaaggcgcaaagccgcagtgcgccgcgccgacggtgaccgaaagctgcgcgctggatttaggttccgcggaggcaaaagcctggattggcgtcgagaacccacatcgtgcggacgtgctgaccgaactgcgtcgcagtactgcggcacgcgtctgtacggggcgtgccgggccgcgtccgcgcacccaggcgctgttgcgcttcctggcggatcactcccgttcgaaagataccgtgctcaaagaagtgccggaagagtgggtaaaagcgcaagggctgctggaagtgcgttcggagatcagcgacaaaaacctgtacctgacgcgcccggatatggggcgtcgcctgagcccggaagccattgacgcgctgaagtcacagtgcgtgatgaacccggatgtgcaggtagtggtctccgatggcctctctacggatgcgatcaccgccaactatgaagagatcctgccgccgttgcttgccggtctgaagcaggccgggctgaacgtcggcacgccgttctttgtgcgctatggccgtgtgaagattgaagatcagattggcgaaattctcggcgcgaaggtcgtcatcctgctggtaggcgaacgtccggggctggggcagtcggaaagcctttcctgctacgcggtctattccccgcgcgtggcgaccaccgtcgaggccgacagaacctgtatttcaaacattcatcagggggggacgccgccagtagaagccgccgccgtgattgtggatttggccaaacggatgctggagcagaaagcgtccggcatcaacatgacccgttaa

SEQ ID NO: 932 - protein, 298 aa, Salmonella typhimurium LT2
MDQKQIEEIVRSVMASMGQDVPQPAAPSTQEGAKPQCAAPTVTESCALDLGSAEAKAWIGVENPHRADVLTELRRSTAARVCTGRAGPRPRTQALLRFLADHSRSKDTVLKEVPEEWVKAQGLLEVRSEISDKNLYLTRPDMGRRLSPEAIDALKSQCVMNPDVQVVVSDGLSTDAITANYEEILPPLLAGLKQAGLNVGTPFFVRYGRVKIEDQIGEILGAKVVILLVGERPGLGQSESLSCYAVYSPRVATTVEADRTCISNIHQGGTPPVEAAAVIVDLAKRMLEQKASGINMTR

SEQ ID NO: 933 - DNA, 660 bp, Salmonella typhimurium LT2
atgcctgcattagatttaattcgaccttcagtgactgccatgcgcgtgattgcctccgtgaatgacggctttgcgcgggaacttaaattaccgccacatatacgtagtctcggactcatcacggcagattctgatgatgtgacctatattgccgctgacgaagcgacaaaacaggcgatggtggaagtggtctatggccgctccctctatgccggggcggctcacgggccgtcgcctaccgctggtgaggtgttgattatgctgggcggaccgaacccggcggaagtgcgcgccggtctggatgcaatggtcgccagcattgaaaacggcgcggcgttccagtgggcgaacgatgcggaaaataccgcattcctggcgcatgtggtttcgcgtaccggctcgtacctctcgtctaccgcaggtatcgcgctgggcgatccaatggcctacctggtggcgccgccgctggaagcgacattcggcattgacgcggcgatgaaatccgctgacgttcagctggtgacttacgtgccgccgccgtcggaaaccaactattcggccgcgttcttaacgggaagccaggccgcgtgtaaagccgcctgcaacgcctttaccgacgccgtgctggatatcgcccgtaaccctgtccagcgtgcgtaa

SEQ ID NO: 934 - protein, 219 aa, Salmonella typhimurium LT2
MPALDLIRPSVTAMRVIASVNDGFARELKLPPHIRSLGLITADSDDVTYIAADEATKQAMVEVVYGRSLYAGAAHGPSPTAGEVLIMLGGPNPAEVRAGLDAMVASIENGAAFQWANDAENTAFLAHVVSRTGSYLSSTAGIALGDPMAYLVAPPLEATFGIDAAMKSADVQLVTYVPPPSETNYSAAFLTGSQAACKAACNAFTDAVLDIARNPVQRA

SEQ ID NO: 935 - DNA, 495 bp, Salmonella typhimurium LT2
atgatcaatgccctgggattactggaagtggacggaatggtcgccgccgtcgatgcggcggatgctatgctgaaagcggccaacgtgcgtttgctcagtcatcaagtgctcgaccctggcaggctcacgctggtggtggagggcgatctggcggcgtgtcgtgcggcgctggatgccggaagcgctgccgcgcagcgcacaggccgtgtgattagtcgcaaagaaattggtcgtccggaagaggacacccagtggctgattggcgggtttgcgcgtgcgacaacgccgactgagaaagcaccccaggtacccgcaacgcctgagttcgctgaggcgttattggcgctgctggcatcagtacgccagggaatgacggcgggagaggttgccgcgcattttggctggccgctggagcaggccagaaacgtgctggaacaactcttttctgacggagcgttgcgtaaacgcagtagtcgctatcgcatcaaaaattaa

SEQ ID NO: 936 - protein, 164 aa, Salmonella typhimurium LT2
MINALGLLEVDGMVAAVDAADAMLKAANVRLLSHQVLDPGRLTLVVEGDLAACRAALDAGSAAAQRTGRVISRKEIGRPEEDTQWLIGGFARATTPTEKAPQVPATPEFAEALLALLASVRQGMTAGEVAAHFGWPLEQARNVLEQLFSDGALRKRSSRYRIKN

SEQ ID NO: 937 - DNA, 1416 bp, Alpha Carboxysome, Type 1, Thiomicrospira crunogena
atggcaagtaaaacgtttgatgctggtgtacaagattaccagctgacttattggacaccggattatactccgttagataccgatctattggcttgtttcaaagtcgtacctcaggatggggttcctcgtgaagaagcagcagcagcggtagcagcagaaagttcaaccggtacatggacaacagtttggacagatttgttgaccgatatggaattctacaaaggtcgttgttaccgtattgaagacgttccaggtgataagaacgctttctacgcgtttatcgcgtaccctctagacctgtttgaagaagggtctgtggtaaacgttctaacgtctttggttggtaacgtattcggatttaaagccgttcgttcattgcgtttggaagatcttcgtttcccgatcgcatttattaaaacatgcggtggacctccagcaggtatccaagtagagcgtgacaagttgaacaagtatggtcgtcctatgttgggttgtactatcaagcctaagctaggtctatcggctaaaaactacggtcgtgcggtttatgagtgtctacgtggtggtctagatttgaccaaagatgatgagaacattaactctcagccattccaacgttggcagaaccgttttgagtttgttgcggatgctgttgataaggcgactgcagaaactggtgagcgtaaaggtcactacctaaacgtaacagctggtactgttgaagaaatgatgaagcgtgctgagtttgctaaagaacttggtcagccaatcattatgcatgacttcttaacagctggtttcactgcgaatacaacacttgcaaactggtgtcgtgataacggtatgttgttacacattcaccgtgcgatgcatgctgtaatcgaccgtaaccctaaccatggtattcacttccgtgttttggctaagtgtctacgtttgtcaggtggtgaccacctacatactggtacggttgttggtaagttggaaggtgaccgtgcttctacgctaggtttcgttgatcagttgcgtgaagcatttgttcctgaagaccgttcacgtggtgttttctttgaccaagattggggatcaatgcctggtgttatggcggttgcttctggtggtatccatgtatggcatatgcctgcgttggttaacatctttggtgatgattctgttcttcagttcggtggtggtacgcaaggtcacccaggcggtaacgcagcaggtgcagcggctaaccgtgtagcgcttgaagcatgtgttaaagcacgtaacgaaggtcgtgatctggaaagagaaggtggagacatcttaagagatgccgcacgtaacagtaaagaattggcagtggctctagatacttggaaagaaatcaagtttgagttcgatacagttgacaagctggatgtaggctaa

SEQ ID NO: 938 - protein, 471 aa, Alpha Carboxysome, Type 1, Thiomicrospira crunogena
MASKTFDAGVQDYQLTYWTPDYTPLDTDLLACFKVVPQDGVPREEAAAAVAAESSTGTWTTVWTDLLTDMEFYKGRCYRIEDVPGDKNAFYAFIAYPLDLFEEGSVVNVLTSLVGNVFGFKAVRSLRLEDLRFPIAFIKTCGGPPAGIQVERDKLNKYGRPMLGCTIKPKLGLSAKNYGRAVYECLRGGLDLTKDDENINSQPFQRWQNRFEFVADAVDKATAETGERKGHYLNVTAGTVEEMMKRAEFAKELGQPIIMHDFLTAGFTANTTLANWCRDNGMLLHIHRAMHAVIDRNPNHGIHFRVLAKCLRLSGGDHLHTGTVVGKLEGDRASTLGFVDQLREAFVPEDRSRGVFFDQDWGSMPGVMAVASGGIHVWHMPALVNIFGDDSVLQFGGGTQGHPGGNAAGAAANRVALEACVKARNEGRDLEREGGDILRDAARNSKELAVALDTWKEIKFEFDTVDKLDVG

SEQ ID NO: 939 - DNA, 345 bp, Alpha Carboxysome, Type 1, Thiomicrospira crunogena
atgtcaatttcacaaatagatgattaccgtacacagtacacattagaaactttctcgtttcttccagaactgacggctgatgaaatttacgatcaaatcgtttacatcatcaaccaaggttggtcgccggcacttgaacatgaagagccagcaaaagcatcagatcattactggggtatgtggaagttgccaatgtttggtacacgcgatccaaatgaagttttggctgagattgatgcttgtcgtcaagcttacccaaatcacttgatccgtttggttgggtatgacaactatactcagtgccaaggtcacaactttgtggtttatcgcccacgtggcatgtaa

SEQ ID NO: 940 - protein, 114 aa, Alpha Carboxysome, Type 1, Thiomicrospira crunogena
MSISQIDDYRTQYTLETFSFLPELTADEIYDQIVYIINQGWSPALEHEEPAKASDHYWGMWKLPMFGTRDPNEVLAEIDACRQAYPNHLIRLVGYDNYTQCQGHNFVVYRPRGM

SEQ ID NO: 941 - DNA, 1989 bp, Alpha Carboxysome, Type 1, Thiomicrospira crunogena
atgagtacaagtaatgctcaaagcggtcgagccgcagccattgcgcgccgtaatgcacaggtaaaaggaaagggttacacggcttcagctgctccggcagcacctcgtaagccagctgctccggttgctgaacctgttgttgctgctgcgcctgctccttctcagccgtctcgttctcgtcgtaaagtgtctgttgcaccgactgccacaccggcagcctctgcagcaggccgtgaagcggctaaattaaagagacagcaacagaagaacggtaaaagttcggctggtgcagcaaacgcaatgcctcaccctaaggcaaaagctaagcaaaaacctgaagagccgattgtcgagcctcgtcaggctaaggcagaaaaacctactaagcgttctgaacgccgaacaggtgtgaagcctcaagttgcttcgcaacaacctagcggtcgacttcaatcgaaggcgtatcgtaaggctcaagcaaaagggaaagctggacaagaagcatttaagtcaaatggtagtagtcaatctggcgctaaagctaagttggctaaccctgacgcttctacacgagagattgctcagcaagttcgtgcagaaagatgcgcgcaaggaaaaacctgttctacagggggttccagaccaatgcgtaaacgtagaaatgctaaagaagcacctcagaaagtaggtgagtctcaaacccttcatgggcaaagtgtttctggtacacaagtcggtcaaggcgaaaagaaaatgacaggttctgaatccggtgcatgtcaattggtcagtgggacggaatatttgggtgcagaagaattcagtaagaattgtgatgtgcaaccaacgccacaaccagcgaaagtgacgcaaacacagaccactcgtggtcaggttgtaagcggttcaactaaagttggtcgtagcgataagatgacgggtaatgaaacgggcacatgttcggccattaccggtactgaatatctacctgcggatcaaagcaagatgtattgcggtgaaacacctgccaagtctaaggcaaccggtttttcggtaatgtctcaggcaacgcaaaaaagtgaacaaaaggtcaccggtggcgacagtcgaaagtctcaatcgaccacttttaaacctaaaaaccctgcgagtgcaccacataaagtgatgccttcacagactgctaaaggaaataccacaacgggaagccaagtgggacgtcttgagtcggtaactgggggtgaaagaggatcctgccatgcggtaacaggaacaggttatcaaggcgctgaagaagcaaaggcatgtgatatgcctatgacagaaacagcggacaaggtaacggcttctggaacagctggcggtcagaaagtgacgggtgatcgaagtggtgcttattatggaatgactggtgcagaagcaggtgactgcaaaactattaccggaacttcttacactggtacagagcaatttcagttctgttcagttgatgagcaaaacgagatgaaagtgcgtcagcgtaaaggtgccaacccttcaatttctggggttcaacctggtccgcaaggtctgactggtgcacagaagggtgcttgtgagttggtaactggctcgcattatcaaggtggtgatcaaactgcgatggtatgcgattcaaccaatgctgcggcacctggagagtcggattttccggctatgattggacaagcgcaacctgctttttcaacgaatgaagtagaaccgatggttgatgaaggctcgaaaattactggtgatggatgggaccgtggttccaaagttacgggtacagacggaccttgggcagcacaacgtaatgcttcaatccgaggagttgctggacagtcaccaatgggagcaagtcaatatagacctgttaacaatgaagttccgatgagcccgattactggttcttctggaaatactgatacgggagcgaaagtgaccttatcaggtggtgcacgagcgtaa

SEQ ID NO: 942 - protein, 662 aa, Alpha Carboxysome, Type 1, Thiomicrospira crunogena
MSTSNAQSGRAAAIARRNAQVKGKGYTASAAPAAPRKPAAPVAEPVVAAAPAPSQPSRSRRKVSVAPTATPAASAAGREAAKLKRQQQKNGKSSAGAANAMPHPKAKAKQKPEEPIVEPRQAKAEKPTKRSERRTGVKPQVASQQPSGRLQSKAYRKAQAKGKAGQEAFKSNGSSQSGAKAKLANPDASTREIAQQVRAERCAQGKTCSTGGSRPMRKRRNAKEAPQKVGESQTLHGQSVSGTQVGQGEKKMTGSESGACQLVSGTEYLGAEEFSKNCDVQPTPQPAKVTQTQTTRGQVVSGSTKVGRSDKMTGNETGTCSAITGTEYLPADQSKMYCGETPAKSKATGFSVMSQATQKSEQKVTGGDSRKSQSTTFKPKNPASAPHKVMPSQTAKGNTTTGSQVGRLESVTGGERGSCHAVTGTGYQGAEEAKACDMPMTETADKVTASGTAGGQKVTGDRSGAYYGMTGAEAGDCKTITGTSYTGTEQFQFCSVDEQNEMKVRQRKGANPSISGVQPGPQGLTGAQKGACELVTGSHYQGGDQTAMVCDSTNAAAPGESDFPAMIGQAQPAFSTNEVEPMVDEGSKITGDGWDRGSKVTGTDGPWAAQRNASIRGVAGQSPMGASQYRPVNNEVPMSPITGSSGNTDTGAKVTLSGGARA

SEQ ID NO: 943 - DNA, 1587 bp, Alpha Carboxysome, Type 1, Thiomicrospira crunogena
atgaatcgtttgaaaaaaagtcatcgtcaaaagtcattgttttggaggccgatagcgccaaaccctcggtggcagaaggaaaatcctactgctcatggatctactgatactgggggctttggttataacggcggaaacgaagaggttaaaacgtcttcgacaatgatgaatggcatccatgctttggttaatgaaagacaaaatgaatggctgcgcgggtatgaagtggatatcaaatcccgttttgataatatcgaatcggtgttgaaagacattttagctcagcaaagccaacttaattttgtcagttgggccaaccaacagttatttgcaaagttgggtgtatccttgacagagcaggattggcaatctggagtgcaattgcaatcacagaaaggctttcagtttttgtacgggaaaaccctctttgcccaatttatgagaatgtcagaagacttctttgtgaatgatcctttgtcgggtcagagaaagcaagaagcagagcgtatgtttaaagaagctggatttcatgcagtgggtattgcaccttgtgcagatggacgtttagcacacattttaagttacgtactccgcttaccttatgccttagcaagacgtaaggcacatgcaggcgtcatgtttgatgtcagcgaaagtgttcgaaactgggtgtttatagaacacacgagatttcgtgatggtcagccaaatttggcggatgaaccaacacgttacttaaagattgcggtgtatcacttttctaaggcagaccctacacatcaagggtgtgcagctcatgggagtgatgaccataaagcggcgcaagcggctttacaaaaattaaaagattttaaacaagcgattgaaaatcgttttggttgcggatcgacggttcaaaccttattactggggttgaacacagatgatgacagcatgaaggtgcatatcccgaatgcgagtggtgaagtctgtttggatcgttatgttgaaacagagcaactgtatcaggcgacaatgaatttgcctgatagtgaggccaagcaagcgttggaaaatgccatcgtcacttgtaatcaagctcttgggtcaacggctcctcagccagaactggttaaattgttgagctggttgattggtaacaacttttctcaaattgcgtatgttaatcaatatgagaacggatgttacagcgacataggccatgccgaaagatttatcggtattggtaacgggtttgaagaagtgcaattacgtaacctgagttattacagctttcttgatacggttgaggaaggtgtgaatgacgtggatgtcggaatcaaaatttttaaaggcttgaatgtcaaaaaagggttgccgattccaatcattatccgctgtgattatgacggtcgcgtacctggctcaaaagacagagctgaagcaaaagctttgcgaattgagaaggcattgcacaatcgctatcaagaattgtcggcaccgggtttgttgcaaaccctaccgaccttgagagattttaccagctgtaaaccagctgaaagattaccaggcctggcggatttatcagccaagcaaagaaccgcatag

SEQ ID NO: 944 - protein, 528 aa, Alpha Carboxysome, Type 1, Thiomicrospira crunogena
MNRLKKSHRQKSLFWRPIAPNPRWQKENPTAHGSTDTGGFGYNGGNEEVKTSSTMMNGIHALVNERQNEWLRGYEVDIKSRFDNIESVLKDILAQQSQLNFVSWANQQLFAKLGVSLTEQDWQSGVQLQSQKGFQFLYGKTLFAQFMRMSEDFFVNDPLSGQRKQEAERMFKEAGFHAVGIAPCADGRLAHILSYVLRLPYALARRKAHAGVMFDVSESVRNWVFIEHTRFRDGQPNLADEPTRYLKIAVYHFSKADPTHQGCAAHGSDDHKAAQAALQKLKDFKQAIENRFGCGSTVQTLLLGLNTDDDSMKVHIPNASGEVCLDRYVETEQLYQATMNLPDSEAKQALENAIVTCNQALGSTAPQPELVKLLSWLIGNNFSQIAYVNQYENGCYSDIGHAERFIGIGNGFEEVQLRNLSYYSFLDTVEEGVNDVDVGIKIFKGLNVKKGLPIPIIIRCDYDGRVPGSKDRAEAKALRIEKALHNRYQELSAPGLLQTLPTLRDFTSCKPAERLPGLADLSAKQRTA

SEQ ID NO: 945 - DNA, 273 bp, Alpha Carboxysome, Type 1, Thiomicrospira crunogena
ttgaaaatatataaagttgataaaaccctcgtttcaacaaatcgtattgcgatgatggagcataagcctctattagttgtgcgagagaaagacggaggcacgcctcaagtagcggtagatccggtaggttgtaaaccaggtgattgggtcatttgttgtggtagttcggcggcacgtgatgcaaccggcgttaaaggttaccctagcgatctcacaatagtgggcattatcgataaatgggaagtaccacaagatgcagatactacaagttaa

SEQ ID NO: 946 - protein, 90 aa, Alpha Carboxysome, Type 1, Thiomicrospira crunogena
MKIYKVDKTLVSTNRIAMMEHKPLLVVREKDGGTPQVAVDPVGCKPGDWVICCGSSAARDATGVKGYPSDLTIVGIIDKWEVPQDADTTS

SEQ ID NO: 947 - protein, 255 aa, Alpha Carboxysome, Type 1, Thiomicrospira crunogena
ATGCAGATACTACAAGTTAAAAAACAGTTGGTTCTGACTAGCCGCTTAAAGGATTTGGGACACCTCCCTTTAAAGGCACTGAGTTCAGAAACGGGTGAAATATTTGTAGCGATGGATCCGGTAGGAACAAAAGATGGTGACTGGGTTTTTACCATCGCTAATTCTGCGGCAAGAGATGCGGCAGGAGACAAAAGATTATTAACAGATTTAACGGTTGGCGGCATCATTGATGACTGGCAGCCAAAACAGAAGTAA

SEQ ID NO: 948 - protein, 84 aa, Alpha Carboxysome, Type 1, Thiomicrospira crunogena
MQILQVKKQLVLTSRLKDLGHLPLKALSSETGEIFVAMDPVGTKDGDWVFTIANSAARDAAGDKRLLTDLTVGGIIDDWQPKQK

SEQ ID NO: 949 - DNA, 291 bp, Alpha Carboxysome, Type 1, Thiomicrospira crunogena
atgagtgattacggtattgccctaggcatgattgagacccgtggtttggtgccagcaattgaagcagcagatgctatgactaaagcagctgaagttcgcttagtaagccgtgaatttgttggtggtggttatgtcactgtattggttcgtggtgaaacaggtgcggtaaacgcagcggttcgtgctggtgctgatgcttgtgaacgtgtaggtgacggactagtcgcagcgcacatcattgctcgcccacacaaagaagtggaaccagttttaacaatggaacagaaataa

SEQ ID NO: 950 - protein, 96 aa, Alpha Carboxysome, Type 1, Thiomicrospira crunogena
MSDYGIALGMIETRGLVPAIEAADAMTKAAEVRLVSREFVGGGYVTVLVRGETGAVNAAVRAGADACERVGDGLVAAHIIARPHKEVEPVLTMEQK

SEQ ID NO: 951 - DNA, 294 bp, Alpha Carboxysome, Type 1, Thiomicrospira crunogena
atgagtacggaatatggaattgcattaggaatgattgaaactcgtggtttagtaccagcaattgaagcagcagatgctatgactaaagcagctgaagttcgcttagttagccgtgagtttgttggtggcggttatgtcactgtattggttcgcggtgaaacaggtgcggtaaacgcagcggttcgtgctggtgctgatgcttgtgaacgtgtaggtgacggtcttgttgcagcacacatcattgctcgccctcacaaagaagttgagcctgttttaacaatggaaaagaaataa

SEQ ID NO: 952 - protein, 97 aa, Alpha Carboxysome, Type 1, Thiomicrospira crunogena
MSTEYGIALGMIETRGLVPAIEAADAMTKAAEVRLVSREFVGGGYVTVLVRGETGAVNAAVRAGADACERVGDGLVAAHIIARPHKEVEPVLTMEKK

SEQ ID NO: 953 - DNA, 309 bp, Alpha Carboxysome, Type 1, Thiomicrospira crunogena
atgagtacagaatacggaattgctttaggtatgatcgaaacacgcggtttggttccagcgattgaagctgcggatgcaatgactaaagcagcagaagttcgcttagttagccgtgaatttgttggtggcggatacgttactgttttggttcgcggtgaaacaggtgcggtaaacgcagcggttcgtgctggtgcagacgcttgtgaacgtgtaggtgacggtcttgttgcagcgcacatcattgctcgcccacacaaagaagttgagccagttttggcgcttggtaacagttcacctgatcgtagctaa

SEQ ID NO: 954 - protein, 102 aa, Alpha Carboxysome, Type 1, Thiomicrospira crunogena
MSTEYGIALGMIETRGLVPAIEAADAMTKAAEVRLVSREFVGGGYVTVLVRGETGAVNAAVRAGADACERVGDGLVAAHIIARPHKEVEPVLALGNSSPDRS

SEQ ID NO: 955 - DNA, 549 bp, Alpha Carboxysome, Type 1, Thiomicrospira crunogena
atgcgttattcatcaagaatgccaggaagtgtcatgccaggtgcgggtgcacacccaagaatacctcaagtacaaacgtctgttgctaacagtcagatcttgggatatttaggacgtgcccttagcttggaattcacagcaggtcagcattatctcgcacaagcttcgttggcaaagttccgtcaggaaatttcgtatgcagaaggctttattacactggcgaatgaagaattccagcatgcaaatctgattaccgatcgtatggtagcacaaggtgctttgccggcaggtagtgtgttacgacccgctggtagtgctaataatattgccgaagcactgaaaagttgtgaagagcgtgaaattgcgttgatacagctttatacagaagccacacaatattgtgccaatatgggcgctcaggaagaccatgctttgttcagccgtctattagaggaagaacaatctcaattaatgagagtacaagcttggttacaagactacttccaaatgatggcaaacacgtatcaacccgataggagttttgtatga

SEQ ID NO: 956 - protein, 182 aa, Alpha Carboxysome, Type 1, Thiomicrospira crunogena
MRYSSRMPGSVMPGAGAHPRIPQVQTSVANSQILGYLGRALSLEFTAGQHYLAQASLAKFRQEISYAEGFITLANEEFQHANLITDRMVAQGALPAGSVLRPAGSANNIAEALKSCEEREIALIQLYTEATQYCANMGAQEDHALFSRLLEEEQSQLMRVQAWLQDYFQMMANTYQPDRSFV

SEQ ID NO: 957 - DNA, 276 bp, Alpha Carboxysome, Type 1, Thiomicrospira crunogena
atgaatgagcgatggaagttgaaaaaaaagccagccagcttagaggcgcgttttgaattcaatgattttgaaaagctaagagcttttttagatgagttggccgagcaggcagatttactggatcatcaccctaatatcagttttggtagagggcatgcttcagtcatcatttattcaaacagcgaagagctgaccgaaattgattatgcccttgctaaaggaattgatgaaggtttccatcgtgtaaccgcttacttacaaggatcagagtcatga

SEQ ID NO: 958 - protein, 91 aa, Alpha Carboxysome, Type 1, Thiomicrospira crunogena
MNERWKLKKKPASLEARFEFNDFEKLRAFLDELAEQADLLDHHPNISFGRGHASVIIYSNSEELTEIDYALAKGIDEGFHRVTAYLQGSES

SEQ ID NO: 959 - DNA, 390 bp, Alpha Carboxysome, Type 1, Thiomicrospira crunogena
atgaaatggtatgaagatgagaatgaagctgaaaattggaatatggggaatgccgtcttagcaggttcgaagagaactaatgagacagccgattctaacgtcatggatgttagttcgaacaagtgggttcaaattgtttttcctgaggtgcttgaaaaagagttattggaagtgatcaagattttggggattgaaaaccacaccctttttgacgctaaaagcgataccaataacctttctttatcagaaaacagtcaaaccatgctgatggctgaagtggaaaatgaaacgttaagtttattgttagatgaaatgaacttgtatattgaaaaaggtcatcctttaacggtgttaacttccgatgtagaagtgatgacacaatcgaattga

SEQ ID NO: 960 - protein, 129 aa, Alpha Carboxysome, Type 1, Thiomicrospira crunogena
MKWYEDENEAENWNMGNAVLAGSKRTNETADSNVMDVSSNKWVQIVFPEVLEKELLEVIKILGIENHTLFDAKSDTNNLSLSENSQTMLMAEVENETLSLLLDEMNLYIEKGHPLTVLTSDVEVMTQSN

SEQ ID NO: 961 - DNA, 612 bp, Alpha Carboxysome, Type 1, Thiomicrospira crunogena
atgatgtctccgattattttggcaaccaacaacccatataaagtggctgaaattgcgcccattatgaacagagcagggcttgtaactcagtgccaagccgacttctttaatgaagaagtggttgaagatgaattgagttttgtggaaaacgctttaaaaaaagcccgttttgccagtgaaagaacagggttgccggccttgggagatgattccgggttggaagtgaatgcccttggaggcaggcctggtcttttttcggcccgatatgcaggcggtgagcaaaagccgtctgatgaagagaatttaaaaaagttgttaaatgatatgacccaactcccttatccacagcgccaagctcgttattcttgtgctgtggtttatgttgaaaatgcgcaagatccgatgcctttgatcggtatcggtcattggtacggtgaaattttaatgagacctagaaccggtgctggtattggttatgacgatgtgttttggattccgaagttattgaaatcggtgtcggaaattccatttgaattgaagaaccaaatcagccaccgcgccagagccgtacaatcggttgttcaacaactgacagaaaggggcggacgatga

SEQ ID NO: 962 - protein, 203 aa, Alpha Carboxysome, Type 1, Thiomicrospira crunogena
MMSPIILATNNPYKVAEIAPIMNRAGLVTQCQADFFNEEVVEDELSFVENALKKARFASERTGLPALGDDSGLEVNALGGRPGLFSARYAGGEQKPSDEENLKKLLNDMTQLPYPQRQARYSCAVVYVENAQDPMPLIGIGHWYGEILMRPRTGAGIGYDDVFWIPKLLKSVSEIPFELKNQISHRARAVQSVVQQLTERGGR

SEQ ID NO: 963 - DNA, 618 bp, Alpha Carboxysome, Type 1, Thiomicrospira crunogena
atgattgaattacgtacgtatgtgtttttggattcgcttcagccccagttagcgtcttatatggcgacggcttcaatgggctttttacctgtgccgggcgattcttcattgtggattgaggtagcgccagggatggcggtacaccgtttatcggatatcgcattgaaagcatcaaatgtccgacttgggcaacagattgttgaacgtgcttacggttcgatggttattcaccaccgagaccagagtgatgtcttggaagccgggcaacgaattttagaccatctccagacacgtgaatacgaccgtcaacaatgtgtggtgatgtggaatgaaattattcgtggtgtgacggccgatcatgcgacgctgattaaccgagacaaccggaaaggttcgatgattttgccgggacaaagcatgtttatcatggaaacggaaccggcggggtatattatttatgcggcgaatgaagcggaaaaggcggccgatgtcaccttagttgaagcgcgagctgtcggggcgtatggtcgtttagtgatgtgcggaaaagaaggtgatattacagaagctgccagagccgcaaatgaggctttaaaacggttaacctgtcgttcataa

SEQ ID NO: 964 - protein, 205 aa, Alpha Carboxysome, Type 1, Thiomicrospira crunogena
MIELRTYVFLDSLQPQLASYMATASMGFLPVPGDSSLWIEVAPGMAVHRLSDIALKASNVRLGQQIVERAYGSMVIHHRDQSDVLEAGQRILDHLQTREYDRQQCVVMWNEIIRGVTADHATLINRDNRKGSMILPGQSMFIMETEPAGYIIYAANEAEKAADVTLVEARAVGAYGRLVMCGKEGDITEAARAANEALKRLTCRS

SEQ ID NO: 965 - DNA, 954 bp, Alpha Carboxysome, Type 1, Thiomicrospira crunogena
atgagcgactattcaagcaataagcctaaaaactttttaatacgccatgcttcattgcgtcaaatacaggtgtttgaatcggtggcgcgtaatcttagttttactaaggcggctgaagagcttcacttaactcaaccaacggtttcttctcaggtaaaaagtctaggggaagcgattggggtggcactttacgagcaggtaggtcgcaaaatttatctgactcaaattggtgaagaagtcgcatgcagttgccgtgatgtcattaataatttctcaaatttagagatgaaattagatgattacagcggcatgaagcgcgggcgtttgcgtgttgcggtgatgacgacagccaagtatttcatgcctttggcactaggccatttttgtaagaaatatccagatatagagttggaactgaccattgccaatcgaaacaatttgttaaagcggatcagtcgaaacttggacgatatttatattctcggccaaattcctcccagcgatttagatttagaagtgattcaattcgcgcccaaccccttagtcatgattgcgaacagagagcatgaactggcaggaaagaaagtgacgcttaaacgcttgtctaaagaacctttcattctgcgtgaagaagggtccggtattcgtatggcggttgaaaaggctttctctgataaaggattaaaggtcaatggacgtttaactttaaaaagtaatgaagccattaaacattgtgtggtaggtgacctaggcgttgcttgcgtatcgaaacatgcgctttatctggaaagtctagagaaagatacaggaccgattgtcgaattagatgtagaaggctttccgattgaaaagcactggaacattgtttatttatcgggcaaagaactttccgttatcgctaaagaatttttagatttcttaatggaatctggtaatgagtacattcatctttag

SEQ ID NO: 966 - protein, 317 aa, Alpha Carboxysome, Type 1, Thiomicrospira crunogena
MSDYSSNKPKNFLIRHASLRQIQVFESVARNLSFTKAAEELHLTQPTVSSQVKSLGEAIGVALYEQVGRKIYLTQIGEEVACSCRDVINNFSNLEMKLDDYSGMKRGRLRVAVMTTAKYFMPLALGHFCKKYPDIELELTIANRNNLLKRISRNLDDIYILGQIPPSDLDLEVIQFAPNPLVMIANREHELAGKKVTLKRLSKEPFILREEGSGIRMAVEKAFSDKGLKVNGRLTLKSNEAIKHCVVGDLGVACVSKHALYLESLEKDTGPIVELDVEGFPIEKHWNIVYLSGKELSVIAKEFLDFLMESGNEYIHL

SEQ ID NO: 967 - DNA, 1557 bp, Alpha Carboxysome, Type 1, Thiomicrospira crunogena
atgaatatgcaatgggtaggggcttcaatgatgctgttaatcccagtactgtttttccttggttcgcttactaatgaaagacgtgctaactggaatttagcatcagctatcagcttgcttggattatttttaagcatgtttttaggaattgccgtttattttgaatgggtcaatctgtctatttcaggtcagtgggttggtgtatccaaaatgagtttggttatgttggggctggtctgttttattgcgtttgtcaatgttcgttattccagtgcgtatatggccggtaacgttgatgaagaaaagcgttatctccgttggttaatggtgaccttaggctgtgttgtaactgtaattatcagtaaccatatgttggttcttatggttgcatggatcgcaattagcttgagtttgcatcgtttactggtgtttttccctaatcgtcaaagagcggtattggcggcacataaaaaatttatttttgcgcgcgttgctgaagcttgcctactcggcgctatcttaattttgtattacgaacacggcacttggtttatcagtgatatttaccaaaatgtcagtctgtcgacctcattaacgacgctcgatcaatttgcggcaatgctattggcgctggccgctctggtgaagtgtgctcaactgcctttacatggatggttgattcaagtggttgaagctccgacgcccgtttctgcgttgttgcatgctggaattattaacttaggtggttatttattgattatttttgcgcctttgattgtgttgtccgacatggcgcaatggatcttattaattgtgggcggcataaccactgttttagccgctttagtgatgatgactcgcacatcggtgaaagtgcgtttggcctggtcaaccatgtcgcaaatgggtttgatgctggttgagtgtgctttagggttgtttgagttggcgttactgcatttagttgcgcactcttgttacaaagcttatgccttcttaaacgctggatcggaagtcgaatcaagcatgaaacgtcgattgtctagagccgttgcaccatcggttaaggaatggtggtttgccgggattatgtccgctgcgatggttgtgggcttgatttggctggcggatttatcaggaccttacagtccttggttattgtttgctattgccgtaacacttttaattgccgaaagacgcggtcgattaacctcttcttccgtgattggaatggtgggcttaggtgtcgttctattagtggtttacaccctgcaaaaaaatggcgccagtttgattgtgtcttccatggaaaccagtgtgggctggaaaggcgatttatggattggcttcttgttggtcatgtttatggtgggctactttttgttgcgatatcacagtgaacacatttggatgcgaaaagtcagacgtgctttttatgctggattctatctggatgaatgggttactcgcttaaatttaaggatttatccgacaaggttgcctgttcgttttaaacccaaaaagttacaagttcctaaagaggagttatttcaatga

SEQ ID NO: 968 - protein, 518 aa, Alpha Carboxysome, Type 1, Thiomicrospira crunogena
MNMQWVGASMMLLIPVLFFLGSLTNERRANWNLASAISLLGLFLSMFLGIAVYFEWVNLSISGQWVGVSKMSLVMLGLVCFIAFVNVRYSSAYMAGNVDEEKRYLRWLMVTLGCVVTVIISNHMLVLMVAWIAISLSLHRLLVFFPNRQRAVLAAHKKFIFARVAEACLLGAILILYYEHGTWFISDIYQNVSLSTSLTTLDQFAAMLLALAALVKCAQLPLHGWLIQVVEAPTPVSALLHAGIINLGGYLLIIFAPLIVLSDMAQWILLIVGGITTVLAALVMMTRTSVKVRLAWSTMSQMGLMLVECALGLFELALLHLVAHSCYKAYAFLNAGSEVESSMKRRLSRAVAPSVKEWWFAGIMSAAMVVGLIWLADLSGPYSPWLLFAIAVTLLIAERRGRLTSSSVIGMVGLGVVLLVVYTLQKNGASLIVSSMETSVGWKGDLWIGFLLVMFMVGYFLLRYHSEHIWMRKVRRAFYAGFYLDEWVTRLNLRIYPTRLPVRFKPKKLQVPKEELFQ

SEQ ID NO: 969 - DNA, 2472 bp, Alpha Carboxysome, Type 1, Thiomicrospira crunogena
atgatgttgcacaacgcaaaagcttctgataataatgagttggatcaggctaagccgttgattccccagctttcagacaaacaaaaagaagctttgaacgatgcttgtggacgcattgcaccaacttggccgctggatgaattgattgcggtaaacccatggtgggaaatgcgagatcagcatatttctaaagtttcagccaaactcagcgcgttgagccaagctcagtgcgtgatgccgaaatcttatttccaggaagtctggatggaaacgttgcaacctcagcatgtacagcaagccatcgatgagatggaaaaagattataccgtggacaatcttgaacggtatttgctggaagaagacgaacatacacattggcataacgttagcgattttgttgatagtggacgagatcgtaaatataaaatggcttggcgagatgaaattacccatcaaatcagtcaattttgtgcggattttttccgtttaaaagacagccagggaacgttctctaagacttatcaaggtctttatcatgagtggttggcgacaacccgtcaggataagggaattgagatccttatgggagaagatgggctgactgagcattttatggacctgccggaaagcagtgaaagcctgctggctgaagccttggtcggcttaagagtgccagatagtcaaattgccgattatgcacacgcgttgttattagatgctaatgggtgggcttcttgggtagcgtatttacgttggcaagaccgtttaagcaatgctgaaaatgacttgatgatggactttctagcgattcgtgtcgcgtgggaatgggtactgtggcagcatcaaaaagacagtgatcgttctgtcttcaatgaattaaaagttatgtggcatcatcaaatgagcatcttgccggatttgattgccacccatgaagcggctcaagcgaaatcttggatttggcaaagagccgctgaaattgcgtatcagtctgagttacaacagcaacttaaacacgccagtagaacagaccaaaaagtagagaccgaatcgccgccggttttgctgcaagccgctttttgtattgatgtgcgatcggaagtcattcgtcgtgctttagaagcgcaagattctcgagttgaaacactgggctttgctggcttttttggattgccaattgagtatcaaccggcaggcaccgatgtgtctcgtcctcagttaccggggttgttaaaatcaggcattaaagtcacgccggtgatgacgaaagtgtctaaaggcgcaaccaaacaagccttaaaccgaaaagcacgttggattgagtggggaaatgcacctccggcaacgtttagtatggtcgaagcgaccgggttaatgtacgcgtttaaattattgcgtaacagcttgtttcctgaaagccacacgaacccgattaatgcgatacctgcgacagatgcatttgaactcacccagaatgactcccctttaacgctagatcaaaaagtggagctggctgcagggattttgcatgccatggggctggatcatgatctcgctgaaacggtaatgcttgtggggcatggcagcaccagttgtaataacccgcatgcagccgggctggactgcggtgcttgcggtgggcaaacgggtgaaatcaatgtgcgggtgttagcgttcttgctcaacgatgaatcggttcgtcagggcttactggaaaaagacatcaaaattccggcgcaaactcgttttgtggcggccatgcataataccaccaccgatgaattcacttgttttggtttgaatcatgtggatgaaaccattcaaaaatggttagcgagagcaactgagttcgctcgccaagagcgttcgacgcgattgggattgaatcatcttgaaggtcaaaacctacaccagagcattcagcgtcgcgccaaagactggtctcaagtcagaccggagtggggcttgtccaataatgcagcttttattgttgcgccgcgcgccagaacaagaggggtggattttcaagggcgtgcctttttgcatgattatgattggcaacaagatgccgataacagtttattaaccttgattatgaccgcgccgatggtggtgaccaactggattaacctacaatattatgcatctgtctgcgataatcacgtttatggaagtgggaataaagtcctgcacaatgtggtggatggttgcatcggtgtttttgaagggaatggcggcgatttacgaatcgggttgccgatgcagtctttgcataatggtgagaaatggatgcacgaacctttgcgtttgagcgtgtacattgatgcaccgcagaaaacgattgcacaagtcgtcgctgagaatgacgtggttcgtcatttaattgataatgaatggttgtattgctttagctgggctccggatggtcgcatccatcgttattttaacaatcagtggttggaatctgcctga

SEQ ID NO: 970 - protein, 823 aa, Alpha Carboxysome, Type 1, Thiomicrospira crunogena
MMLHNAKASDNNELDQAKPLIPQLSDKQKEALNDACGRIAPTWPLDELIAVNPWWEMRDQHISKVSAKLSALSQAQCVMPKSYFQEVWMETLQPQHVQQAIDEMEKDYTVDNLERYLLEEDEHTHWHNVSDFVDSGRDRKYKMAWRDEITHQISQFCADFFRLKDSQGTFSKTYQGLYHEWLATTRQDKGIEILMGEDGLTEHFMDLPESSESLLAEALVGLRVPDSQIADYAHALLLDANGWASWVAYLRWQDRLSNAENDLMMDFLAIRVAWEWVLWQHQKDSDRSVFNELKVMWHHQMSILPDLIATHEAAQAKSWIWQRAAEIAYQSELQQQLKHASRTDQKVETESPPVLLQAAFCIDVRSEVIRRALEAQDSRVETLGFAGFFGLPIEYQPAGTDVSRPQLPGLLKSGIKVTPVMTKVSKGATKQALNRKARWIEWGNAPPATFSMVEATGLMYAFKLLRNSLFPESHTNPINAIPATDAFELTQNDSPLTLDQKVELAAGILHAMGLDHDLAETVMLVGHGSTSCNNPHAAGLDCGACGGQTGEINVRVLAFLLNDESVRQGLLEKDIKIPAQTRFVAAMHNTTTDEFTCFGLNHVDETIQKWLARATEFARQERSTRLGLNHLEGQNLHQSIQRRAKDWSQVRPEWGLSNNAAFIVAPRARTRGVDFQGRAFLHDYDWQQDADNSLLTLIMTAPMVVTNWINLQYYASVCDNHVYGSGNKVLHNVVDGCIGVFEGNGGDLRIGLPMQSLHNGEKWMHEPLRLSVYIDAPQKTIAQVVAENDVVRHLIDNEWLYCFSWAPDGRIHRYFNNQWLESA

SEQ ID NO: 971 - DNA, 770 bp, AlphaCarboxysome,TypeII,ProchlorococcusmarinusMIT9313
atgcagcgatttgcgggcttagaaattcgggagcggcgtcaaggtggaagctcgctggtgacaggaactgaggttttgcctcaggcctcaggggcaagctgcgtcattacgactgattcggagacagcaagggttggccgtcaaaatagtcatgtgcagcaaattgaattgcgcacgtatgttttcctcgattcacttcagcctcagctagctgcctacatgggcacggtgagtcaaggctttttaccgattcctggtgatgcttgcctgtggatggaggtctcaccaggcatggctgtccatcgagtgactgatattgcccttaaggccagcaatgtgcgactaggccagatggtcgttgaaagggcttttggttctttggccctataccaccgtgatcagagcactgtgctccattccggtgatgttgttttggatgccattggcagcactgttagccagagaagttcttgtgatgtgagctggaccgaggtgatccgtgcgataaccccagatcacgctgttttgattaatcgccaaaatcgtcgtggttcgatgattgaagctggaatgagcatgttcattcttgaaaccgaaccggctggttatgtattaattgctgccaatgaagctgagaaggcatccaatatcaccatcgttgacgtgaaaggcgtgggagcctttggcaggctcacattggcggggaaagaaggtgatgtagaggaggctgctgctgctgcaatgcgagccatcgatcaaatcaatcgcta

SEQ ID NO: 972 - protein, 256 aa, AlphaCarboxysome,TypeII,ProchlorococcusmarinusMIT9313
MQRFAGLEIRERRQGGSSLVTGTEVLPQASGASCVITTDSETARVGRQNSHVQQIELRTYVFLDSLQPQLAAYMGTVSQGFLPIPGDACLWMEVSPGMAVHRVTDIALKASNVRLGQMVVERAFGSLALYHRDQSTVLHSGDVVLDAIGSTVSQRSSCDVSWTEVIRAITPDHAVLINRQNRRGSMIEAGMSMFILETEPAGYVLIAANEAEKASNITIVDVKGVGAFGRLTLAGKEGDVEEAAAAAMRAIDQINR

SEQ ID NO: 973 - DNA, 600 bp, AlphaCarboxysome,TypeII,ProchlorococcusmarinusMIT9313
ttgattttggctaaaccactgctaaccattgcgagtggaaaccctcgcaaggtcgccgagatcgaagcaatgcttggtccactcccaatcgatgtgcagaggcaaccgcaagatctagatgtcgaggaaacgggctccacttatctagacaatgccctactcaaagctcgagcagtcgcaaaacgagttggaaactggaccattgctgacgactccggattagaagttgatgccctggatggagccccggggctttattcggcccgctttgctgccagcaatcaagaaaaaatcaagaaaatccttgcggcccttgaaaacaacccatatcggagtgctcgcttccgcagtgtgatggttctatgcaattccaaggggaagcttcttaaagcagcagaggggatttgctggggagaactacttagatcgcctgcctatgaaggaggcgagttcgaatcgctgttttgggttcgcgaagcgaactgcacctacggagaactcaataatcaacagctttcaaggcttggtagtcgaggaaaagcggctagagcactagccccttgcctgcgagaacaactaggacttgatcagattgtttag

SEQ ID NO: 974 - protein, 199 aa, AlphaCarboxysome,TypeII,ProchlorococcusmarinusMIT9313
MILAKPLLTIASGNPRKVAEIEAMLGPLPIDVQRQPQDLDVEETGSTYLDNALLKARAVAKRVGNWTIADDSGLEVDALDGAPGLYSARFAASNQEKIKKILAALENNPYRSARFRSVMVLCNSKGKLLKAAEGICWGELLRSPAYEGGEFESLFWVREANCTYGELNNQQLSRLGSRGKAARALAPCLREQLGLDQIV

SEQ ID NO: 975 - DNA, 312 bp, AlphaCarboxysome,TypeII,ProchlorococcusmarinusMIT9313
atggctagcgaaaccatgggcatcgccctaggcatgatcgaaacccgcggcctcgtgccagcaattgaagctgctgacgccatgaccaaggcagctgaagtgcgcctgattggtcgtgagtttgtcggtggtggatatgtcaccgtgctcgtgcgtggtgagacaggtgctgtgaacgccgccgttcgtgctggcgctgatgcttgtgagcgtgttggtgacggccttgtggcagcgcacatcattgctcgccctcatcgggaagttgagcctgcgctaggcaacggcaatttcttaggtcagaaggactga

SEQ ID NO: 976 - protein, 103 aa, AlphaCarboxysome,TypeII,ProchlorococcusmarinusMIT9313
MASETMGIALGMIETRGLVPAIEAADAMTKAAEVRLIGREFVGGGYVTVLVRGETGAVNAAVRAGADACERVGDGLVAAHIIARPHREVEPALGNGNFLGQKD

SEQ ID NO: 977 - DNA, 1413 bp, AlphaCarboxysome,TypeII,ProchlorococcusmarinusMIT9313
atgagcaagaagtatgacgcaggggttaaggagtacagagacacctactggactcccgattatgtacccctagacactgacttactggcctgttttaaatgcactggccaggaaggagtacccagagaggaagttgctgcggctgtagcggctgaatcttcaaccggtacttggtccacagtttggtcagagctattaactgatcttgaattttacaagggccgttgctatcgcatcgaggatgtccctggagacaaggagtccttttacgcttttattgcttaccctctagacctttttgaagaaggttcaatcactaacgttctgacctctttggtcggtaatgtttttggcttcaaagcattacgccatctgcgtttagaagatatccgcttcccgatggccttcatcaagacatgcggtggtcctcctaatggcattgtcgtagaacgtgatcgtttgaataagtacggtcgccccttacttggttgcaccattaagccaaagcttggcctttctggtaaaaactatggacgggttgtttatgagtgtctgcgtggtggtcttgacttaaccaaagacgacgaaaacatcaactctcagcctttccagcgttggcgcgagcgctttgagtttgttgctgaggctgtcaagcttgcacagcaagaaacaggagaagtcaaaggtcattatctcaattgcactgcgacaactcctgaggagatgtatgagcgtgctgagttcgctaaagaactcgacatgccaatcatcatgcatgactacatcactggtggatttaccgctaacacaggtttggcgaattggtgccgtaaaaacggcatgctgttgcatatccaccgcgccatgcatgcggtgattgaccgtcatcccaagcatggaattcacttccgtgtgcttgccaagtgcctgcgtctttccggtggagatcaactccatacaggaactgtggttggcaagctggaaggtgatcgtcagaccactcttggttatatcgacaacctgcgtgagtcttttgttccagaagatcgcagtcgcggtaacttctttgaccaagactggggttccatgcctggtgtttttgctgtggcctctggtggtatccacgtttggcatatgccagcattgttggcaatttttggagacgactcctgtctacagtttggtggtggtactcatggtcatccatgggggtctgctgctggtgccgcggctaaccgagtggcacttgaagcctgtgtgaaagcacgcaatgccggtcgtgagatcgagaaggaaagtcgcgacatccttatggaagcggcgaagcatagccctgagctggccatcgcacttgagacttggaaagaaatcaagttcgagttcgatactgtcgacaagctcgacgttcagtag

SEQ ID NO: 978 - protein, 470 aa, AlphaCarboxysome,TypeII,ProchlorococcusmarinusMIT9313
MSKKYDAGVKEYRDTYWTPDYVPLDTDLLACFKCTGQEGVPREEVAAAVAAESSTGTWSTVWSELLTDLEFYKGRCYRIEDVPGDKESFYAFIAYPLDLFEEGSITNVLTSLVGNVFGFKALRHLRLEDIRFPMAFIKTCGGPPNGIVVERDRLNKYGRPLLGCTIKPKLGLSGKNYGRVVYECLRGGLDLTKDDENINSQPFQRWRERFEFVAEAVKLAQQETGEVKGHYLNCTATTPEEMYERAEFAKELDMPIIMHDYITGGFTANTGLANWCRKNGMLLHIHRAMHAVIDRHPKHGIHFRVLAKCLRLSGGDQLHTGTVVGKLEGDRQTTLGYIDNLRESFVPEDRSRGNFFDQDWGSMPGVFAVASGGIHVWHMPALLAIFGDDSCLQFGGGTHGHPWGSAAGAAANRVALEACVKARNAGREIEKESRDILMEAAKHSPELAIALETWKEIKFEFDTVDKLDVQ

SEQ ID NO: 979 - DNA, 342 bp, AlphaCarboxysome,TypeII,ProchlorococcusmarinusMIT9313
atgcctttccagagcacagttggtgactatcaaacagtcgccaccctggaaaccttcggcttcttaccgccgatgacccaggacgaaatttacgatcaaattgcttacatcattgctcagggatggagccctgtcattgagcacgtccatccaagtggttccatgcagacctattggtcttactggaagttacctttctttggcgagaaggatctgaacatggttgtaagtgagctagaagcttgccatcgtgcatatccagaccaccatgtgcgcatggttggttatgacgcatacacccaaagtcaaggaaccgcattcgtggtatttgaaggccgttga

SEQ ID NO: 980 - protein, 113 aa, AlphaCarboxysome,TypeII,ProchlorococcusmarinusMIT9313
MPFQSTVGDYQTVATLETFGFLPPMTQDEIYDQIAYIIAQGWSPVIEHVHPSGSMQTYWSYWKLPFFGEKDLNMVVSELEACHRAYPDHHVRMVGYDAYTQSQGTAFVVFEGR

SEQ ID NO: 981 - DNA, 2379 bp, AlphaCarboxysome,TypeII,ProchlorococcusmarinusMIT9313
atggcaaaacaatccagtcgagagctagcgcttgaacgccgtaaggccctgagtaattcaggtaagaaatcaaccacattaaatggatcaagtcctaatcgcatccgtactgcctctgatgcacgtctaaccaggactgatcaatctttcgttaaggctgggaaagaatctgtgcagctaaccgctcctaagagagagcaactagatacgtcttttgttgcttctagagaatcatccggagcttcgcgccgtcaagtgaaaacgatccgaaattcaagcagagaattggttttggcccgtcgtgatgagctttctcgccgtggtcagccagcggcaaaaagtaaagatagaactcgtgcagaagttgagaaaatctcttcaaaggttagccagcaggatgctgcaaaaaagcaggttaatgatttagcctctgatcagaaaggtgttgatgaatcttcttcaaagtctttgaagagtttggacactgtctcaagattaagttcaaggaattcaactagtcgtccttctgctaaacgtagatcgatacaaaatccaagtcgtgctttggtccttgcacgccgtgaagcacaatcgaagcacggtaaaacggcagccaatcaaccgacctctgcagcatcagtcgctcgccagggagaccctgacctttcaagtcgagagatttcacagagagtgcgtgaattgcgtagtaaaagtggtgctactggcaaaaaacgttctggtgcttgtcgtccctgtggtcccaatcgcaatggctccaagcaggctgtcgcagcagatgctcattggaaagttggtttaagtgaaaccagtacaggtcaggttgtgactggtactcaagcaaaccgctcatctaaaactactggcaacgaagcgagtacttgtcgttcaattacaggtactcaatatttaggttcagaggtgtttgatactttttgtcagtcggctcctcaaccaggtcaacctttaaaagttgcagttacaaatacaagccatggaaatcgggtgaccggtaatgaagttggtcgctcagagaaagtcactggtgatgaacctgggacttgtaagactttgaccggcactgaatatatttcagctaatcaggccaatcaatattgtggagttagccaaccttctccaagaaaagttggtcagagtgttacagaagatggtcgcaaggttagtggtgtaatggttggacgatccgagaaggttacaggcgacgaggctggttctaatcgtcaattgactggtgatcaataccttggagttgatccacttcctgaagggaggtctgcagagaaagtaggttcatttaatactcttcgtggtgcaggagttactggtacaaatgttgcccgctctgagtacgttacaggcaatgaaccaggtagttgtaaaagagtgactggtgacgaatatgtgggccctcagcaatacaacactttttgtggcggcaagccaaaccctgaggctgccaaggtcggtttaagtcttacaaataagtcgcaaactgttagtggaactcttacaggtcgctcggagcttgtaacaggcgatgaacctggaacttgtaaagctgtaactggaactccctatagcggtgttgaacaggcttcaggttggtgtgatacaaactctgtaagagaaattcaggatcgaactccaaaattgttgggtacacctggcgctgtgatgacaggtcttcagcctggagtaggtggagtgatgacaggagcagagaaaggtgcttgtgaacctttaactggcaccccatatgtaggtggagatcaacttgttcaagcatgtggaagtgatgctcccgctggtagtaatgatcaccagggttcatcagaatcatctccttggactcactttagtgttcagtctcctgcgagagcgatgcagctacagcgtgatcctcgctctggtgtgacaggaacaagttatgagcagggctctcagattacgggtccttttaatatggcggttgataaaattactggcactgagcagttccgttttgaccgcaaacaacgtcatttcaagtcagttcctgttgaagcaacccccaatgatgtaagtcaaacacgcccagaatcacgagttacaggagaaggccaatctgccggcctcaatatcactggtgatgattgggatcgcagtgaaagggtgactggtaccgaaggagcttctgctcgtcgccgtaatccaactcggcctggcccgatgtctgcgatgcctgctgctgatttaaagcgtaatgaggaagtttctcaaccaatgagtcgagtaacagggtcaagtggtaacactgatcaaggctccttgatcacagtctctggcggcgcaaggggttga

SEQ ID NO: 982 - protein, 792 aa, AlphaCarboxysome,TypeII,ProchlorococcusmarinusMIT9313
MAKQSSRELALERRKALSNSGKKSTTLNGSSPNRIRTASDARLTRTDQSFVKAGKESVQLTAPKREQLDTSFVASRESSGASRRQVKTIRNSSRELVLARRDELSRRGQPAAKSKDRTRAEVEKISSKVSQQDAAKKQVNDLASDQKGVDESSSKSLKSLDTVSRLSSRNSTSRPSAKRRSIQNPSRALVLARREAQSKHGKTAANQPTSAASVARQGDPDLSSREISQRVRELRSKSGATGKKRSGACRPCGPNRNGSKQAVAADAHWKVGLSETSTGQVVTGTQANRSSKTTGNEASTCRSITGTQYLGSEVFDTFCQSAPQPGQPLKVAVTNTSHGNRVTGNEVGRSEKVTGDEPGTCKTLTGTEYISANQANQYCGVSQPSPRKVGQSVTEDGRKVSGVMVGRSEKVTGDEAGSNRQLTGDQYLGVDPLPEGRSAEKVGSFNTLRGAGVTGTNVARSEYVTGNEPGSCKRVTGDEYVGPQQYNTFCGGKPNPEAAKVGLSLTNKSQTVSGTLTGRSELVTGDEPGTCKAVTGTPYSGVEQASGWCDTNSVREIQDRTPKLLGTPGAVMTGLQPGVGGVMTGAEKGACEPLTGTPYVGGDQLVQACGSDAPAGSNDHQGSSESSPWTHFSVQSPARAMQLQRDPRSGVTGTSYEQGSQITGPFNMAVDKITGTEQFRFDRKQRHFKSVPVEATPNDVSQTRPESRVTGEGQSAGLNITGDDWDRSERVTGTEGASARRRNPTRPGPMSAMPAADLKRNEEVSQPMSRVTGSSGNTDQGSLITVSGGARG

SEQ ID NO: 983 - DNA, 1545 bp, AlphaCarboxysome,TypeII,ProchlorococcusmarinusMIT9313
atggcctatcgcaatcgcaatttggcctctcaaacgcaaagacccttggcgccgactgctccaaggaggaggcctgtggtaacacctcagatctctgatcgctcaaggctaagagggtttgccaatgttggttcagggccttgccaccctctcacagacagagctgcaaatcagcatctgcagacttatgaagccaatgtcaaaggctcttttgagctgattgttccttttcttaaaaggatctcagcacttcagcatgatcaggattttgtctcaaagtgccaaagtcttgctcgctctgaacttggttttgatttgcctagccaccttttggaacaggcttgggtacgagcattagatatgagggccttatttgcttggtgtgtgtttcagtctcatcagcatgtgagtgaccacttttttcaagaagaccctctgcaaggaggagaaggcagcattcaagcaaagcatttccaatcattccttgttgattgtggttttcatctccttgatgtctccccctgcgctgatggacgcttggcacatacgattgcttatgccttacggattccatttagttcagtaagacgtcgctcccatgcaggtgctctatttgatgttgagaaaactgtcaaccgttggattaagacagaacacagacgttatcgagaaggtgttccaaattcagccgactctccaacgcgttatctcaaggttgtcacctatcattttagttcccttgatccatctcatcaaggatgtgcggctcatgggagtgatgatgccttggcagcttctgctggtcaacagcgcctgcttgattttcgtgaatccgtcgaaaatagtttctgttgtggtgcatcagtagaccttcttttgatcgggcttgataccgatactgatgctattcgtgtgcatgttcctgcggcagatggttcaattgttttagatgagtggctttccgcggaagatctctatcacgagacgctttctctaacttcagatgaggcgatgcaacatattgctgaacgtgttgaagccattgcgcctaagaaacccgacgaggggatggtggcattcattgtgaaattgattgcaaacaacttttctcagattgactacgtgaagcaatcacatgctggaccctacccagatgctgggcatgcagagcgttttattggagttggaataggttttaaggaagtgcatcttcgcaacctaacttatttcgcccatttggatactgtcgaagtaggtgccccagatttagatgtaggagtgaaaatttttaaagggttgaatgtttctcgagatctaccaattcctgttgttgttcgttttgattattctggccaagtcccaggggcaagggatcgggctgtcactgattgctatcgcgtaaatcaagccattgctgagcgttattctgaacttttcgatcagggtcttcttcatacattcttgaccattcgtgatcgtgataaaaaagacacttcagaggtcgtcggttcctccttggagcctgttcatcaggaggcacactga

SEQ ID NO: 984 - protein, 514 aa, AlphaCarboxysome,TypeII,ProchlorococcusmarinusMIT9313
MAYRNRNLASQTQRPLAPTAPRRRPVVTPQISDRSRLRGFANVGSGPCHPLTDRAANQHLQTYEANVKGSFELIVPFLKRISALQHDQDFVSKCQSLARSELGFDLPSHLLEQAWVRALDMRALFAWCVFQSHQHVSDHFFQEDPLQGGEGSIQAKHFQSFLVDCGFHLLDVSPCADGRLAHTIAYALRIPFSSVRRRSHAGALFDVEKTVNRWIKTEHRRYREGVPNSADSPTRYLKVVTYHFSSLDPSHQGCAAHGSDDALAASAGQQRLLDFRESVENSFCCGASVDLLLIGLDTDTDAIRVHVPAADGSIVLDEWLSAEDLYHETLSLTSDEAMQHIAERVEAIAPKKPDEGMVAFIVKLIANNFSQIDYVKQSHAGPYPDAGHAERFIGVGIGFKEVHLRNLTYFAHLDTVEVGAPDLDVGVKIFKGLNVSRDLPIPVVVRFDYSGQVPGARDRAVTDCYRVNQAIAERYSELFDQGLLHTFLTIRDRDKKDTSEVVGSSLEPVHQEAH

SEQ ID NO: 985 - DNA, 276 bp, AlphaCarboxysome,TypeII,ProchlorococcusmarinusMIT9313
atgttgatctgcaaggttcttaagccgcttgtttccactaatcgaatccctggattcgaacacaaacaccttcaagttgttcttgatggaagttccaaaaaggttgcagtcgatgctgtgggttgtaagccagatgactgggtgatttgtgttggcagctcagcagcgagagaggctgcaggaagtaaatcctatcctagtgatcttacgattgtaggcattattgaccattgggatccaggcgccccgaagccagtttcagggggctcagcttga

SEQ ID NO: 986 - protein, 91 aa, AlphaCarboxysome,TypeII,ProchlorococcusmarinusMIT9313
MLICKVLKPLVSTNRIPGFEHKHLQVVLDGSSKKVAVDAVGCKPDDWVICVGSSAAREAAGSKSYPSDLTIVGIIDHWDPGAPKPVSGGSA

SEQ ID NO: 987 - DNA, 252 bp, AlphaCarboxysome,TypeII,ProchlorococcusmarinusMIT9313
atggaaatcatgcaggtgatgggccgtttggtttgtacgcaaagggttgacggtcttggtcatatgcatctgcgtatcctgcgtaataacgctggcaagcagttggtggctgttgatcctgttggtgctcgagagggcaattgggtgttcactgccagtggatcagccgcacgttttgcatgtccagatcccaacactcaaacagatctgacaattggaggaattattgattactggctgccagatggatag

SEQ ID NO: 988 - protein, 83 aa, AlphaCarboxysome,TypeII,ProchlorococcusmarinusMIT9313
MEIMQVMGRLVCTQRVDGLGHMHLRILRNNAGKQLVAVDPVGAREGNWVFTASGSAARFACPDPNTQTDLTIGGIIDYWLPDG

SEQ ID NO: 989 - DNA, 615 bp, AlphaCarboxysome,TypeII,ProchlorococcusmarinusMIT9313
atgccaaaaccttcttcctctagttcttcagacagcccctctttgacgacagcgaaacctgctggctctgaagttgccaaaaaagttcttcctgccaaggcgacacaaactgttgatgtttctgcttcaacatcgtccttatcaggttcaaagtcgactacgcgcagaagcgctgccacagggcgtacatccgccagccgagcaacggctgcgacgcctgcatcaaggggcggtaagagtgctgcgggttccagtggcagtggttctgcgtctggtggcgctatcaagccacccgcctcttcctctgtgccttcttttgttcaggggattgcactcggaatgattgaaactcgtggcatggttcctgccattgaagcggctgatgcaatgacaaaagctgctgaggttaatctcatctctagggaatatgttggtggtggttatgtcactgtgatggtgcgtggcgaaacaggagctgtgaatgcagccgttcgtgctggtgcagatgcctgtgaacgggttggtgatggccttgttgcagcccatattattgctcgtcctcatcaggaagttgagccagcattaagacccactcatgcaaagcgccgcagctaa

SEQ ID NO: 990 - protein, 204 aa, AlphaCarboxysome,TypeII,ProchlorococcusmarinusMIT9313
MPKPSSSSSSDSPSLTTAKPAGSEVAKKVLPAKATQTVDVSASTSSLSGSKSTTRRSAATGRTSASRATAATPASRGGKSAAGSSGSGSASGGAIKPPASSSVPSFVQGIALGMIETRGMVPAIEAADAMTKAAEVNLISREYVGGGYVTVMVRGETGAVNAAVRAGADACERVGDGLVAAHIIARPHQEVEPALRPTHAKRRS

SEQ ID NO: 991 - DNA, 252 bp, AlphaCarboxysome,TypeII,ProchlorococcusmarinusMIT9313
atgaatcaatggcagaagcgctctcgtccaatacgactcgaacggcgatttgaattcgaaacctattcagaaaccagggattttttagaccgtcttggcgagcacactgaagccgcaaagcgcttccctgatataagttttggacgtacctatgtcaatatcactttgcggccggaggatgaagaagaagaggttgagttaaatgatgatgattacaaatttgcagctgagatagatggactcctcaattga

SEQ ID NO: 992 - protein, 83 aa, AlphaCarboxysome,TypeII,ProchlorococcusmarinusMIT9313
MNQWQKRSRPIRLERRFEFETYSETRDFLDRLGEHTEAAKRFPDISFGRTYVNITLRPEDEEEEVELNDDDYKFAAEIDGLLN

SEQ ID NO: 993 - DNA, 918 bp, AlphaCarboxysome,TypeII,ProchlorococcusmarinusMIT9313
atggactcctcaattgatctctctttggcttatgccgattccggagttggtgaggtactagatcagttggattgtgagctgattggcttgaagccggtgaagacgaggattcgagaaattgccgctttgttgttagttgatcgggccaggaaagatctcgatcttgctagcacgatgccaagccttcatatgtcttttactggacgacctggcactggaaagacaactgttgcaatcagaatttctcagattcttcatcgccttggatacctgcgcaaaggacatgttgtaactgtcacccgtgacgacttagttggtcagtacgttggccacacggcaccaaaaactcgggagatgattaaacgtgcgcagggaggtgtgttgtttatagatgaggcatattacctttataaaccaggtaatgaaagagattatggagcagaagcaatcgaaatattgctacaggatatggagagccggcgaggtgattttgttgttatttttgctggttataaagataagatggatgctttctatcaatctaatccgggcctttcttcgagggttgctcaccatattgatttcccggattacagcaaccgggagttgttggctatcgctcagttattcctggtccagcagaactattactttggcgatgaagctgagggcattttcgaggattacatcgaacgtcgccgtcagcttcctttctttgctaatgctcgctcaattcgcaatgctctggaccgtacccgtttgaggcaggcgaaccgattgtttgcacgcatgggagaaccgctcagtcgtgatgaactgatgacgatcgaacctgctgatatcttggcgagtcgtgtattccaaggggaggtggaaggccggcatccgactcaacccctgatggaatcgtctgaatga

SEQ ID NO: 994 - protein, 305 aa, AlphaCarboxysome,TypeII,ProchlorococcusmarinusMIT9313
MDSSIDLSLAYADSGVGEVLDQLDCELIGLKPVKTRIREIAALLLVDRARKDLDLASTMPSLHMSFTGRPGTGKTTVAIRISQILHRLGYLRKGHVVTVTRDDLVGQYVGHTAPKTREMIKRAQGGVLFIDEAYYLYKPGNERDYGAEAIEILLQDMESRRGDFVVIFAGYKDKMDAFYQSNPGLSSRVAHHIDFPDYSNRELLAIAQLFLVQQNYYFGDEAEGIFEDYIERRRQLPFFANARSIRNALDRTRLRQANRLFARMGEPLSRDELMTIEPADILASRVFQGEVEGRHPTQPLMESSE

SEQ ID NO: 995 - DNA, 279 bp, Clostridium kluyveri; identical to SEQ ID NO: 473

SEQ ID NO: 996 - protein, 92 aa, Clostridium kluyveri; identical to SEQ ID NO: 474

SEQ ID NO: 997 - DNA, 1665 bp, Clostridium kluyveri; identical to SEQ ID NO: 471

SEQ ID NO: 998 - protein, 554 aa, Clostridium kluyveri; identical to SEQ ID NO: 472

SEQ ID NO: 999 - DNA, 531 bp, Clostridium kluyveri; identical to SEQ ID NO: 469

SEQ ID NO: 1000 - protein, 176 aa, Clostridium kluyveri; identical to SEQ ID NO: 470

SEQ ID NO: 1001 - DNA, 1092 bp, Clostridium kluyveri; identical to SEQ ID NO: 467

SEQ ID NO: 1002 - protein, 363 aa, Clostridium kluyveri; identical to SEQ ID NO: 468

SEQ ID NO: 1003 - DNA, 663 bp, Clostridium kluyveri; identical to SEQ ID NO: 465

SEQ ID NO: 1004 - protein, 220 aa, Clostridium kluyveri; identical to SEQ ID NO: 466

SEQ ID NO: 1005 - DNA, 999 bp, Clostridium kluyveri; identical to SEQ ID NO: 463

SEQ ID NO: 1006 - protein, 332 aa, Clostridium kluyveri; identical to SEQ ID NO: 464

SEQ ID NO: 1007 - DNA, 951 bp, Clostridium kluyveri; identical to SEQ ID NO: 461

SEQ ID NO: 1008 - protein, 316 aa, Clostridium kluyveri; identical to SEQ ID NO: 462

SEQ ID NO: 1009 - DNA, 282 bp, Clostridium kluyveri; identical to SEQ ID NO: 459

SEQ ID NO: 1010 - protein, 93 aa, Clostridium kluyveri; identical to SEQ ID NO: 460

SEQ ID NO: 1011 - DNA, 1326 bp, Clostridium kluyveri; identical to SEQ ID NO: 449

SEQ ID NO: 1012 - protein, 441 aa, Clostridium kluyveri; identical to SEQ ID NO: 450

SEQ ID NO: 1013 - DNA, 549 bp, Clostridium kluyveri; identical to SEQ ID NO: 447

SEQ ID NO: 1014 - protein, 182 aa, Clostridium kluyveri; identical to SEQ ID NO: 448

SEQ ID NO: 1015 - DNA, 1329 bp, Clostridium kluyveri; identical to SEQ ID NO: 445

SEQ ID NO: 1016 - protein, 442 aa, Clostridium kluyveri; identical to SEQ ID NO: 446

SEQ ID NO: 1017 - DNA, 549 bp, Clostridium kluyveri; identical to SEQ ID NO: 443

SEQ ID NO: 1018 - protein, 442 aa, Clostridium kluyveri; identical to SEQ ID NO: 446

SEQ ID NO: 1019 - DNA, 549 bp, Clostridium kluyveri; identical to SEQ ID NO: 443

SEQ ID NO: 1020 - protein, 182 aa, Clostridium kluyveri; identical to SEQ ID NO: 444

SEQ ID NO: 1021 - DNA, 1326 bp, Clostridium kluyveri; identical to SEQ ID NO: 449

SEQ ID NO: 1022 - protein, 441 aa, Clostridium kluyveri; identical to SEQ ID NO: 450

SEQ ID NO: 1023 - DNA, 549 bp, Clostridium kluyveri; identical to SEQ ID NO: 447

SEQ ID NO: 1024 - DNA, 549 bp, Clostridium kluyveri; identical to SEQ ID NO: 447

SEQ ID NO: 1025 - DNA, 1329 bp, Clostridium kluyveri; identical to SEQ ID NO: 445

SEQ ID NO: 1026 - protein, 442 aa, Clostridium kluyveri; identical to SEQ ID NO: 446

SEQ ID NO: 1027 - DNA, 549 bp, Clostridium kluyveri; identical to SEQ ID NO: 443

SEQ ID NO: 1028 - protein, 182 aa, Clostridium kluyveri; identical to SEQ ID NO: 444

SEQ ID NO: 1029 - DNA, 279 bp, Clostridium kluyveri
atgggacaggaagcattaggaatgatcgaaacaaaaggactagtgggagctattgaagctgctgactcaatggtaaaggcagcaaatgttgcacttatcggatatgagaaaataggttcaggacttgtaaccgttatggtaagaggagacgtaggagcagtaaaggcagcaacagatgcaggagctgcttcagctaagagagtaggagaagttatatcagtacacgttattccaagacctcatacggatgtagaaaaaatattgcctaacattggctaa

SEQ ID NO: 1030 - protein, 92 aa, Clostridium kluyveri
MGQEALGMIETKGLVGAIEAADSMVKAANVALIGYEKIGSGLVTVMVRGDVGAVKAATDAGAASAKRVGEVISVHVIPRPHTDVEKILPNIG

SEQ ID NO: 1031 - DNA, 915 bp, Clostridium kluyveri
atgaataatgagttaatcgaaaaggttttaggtgaagttagaaagagtttagatttgaaaaattttgaccaggaaaagttaaataaagttgtagaatcaactactgaaaagttgtcggattcaaaaaaagaagaagctataaaagaagccaaaccagatgtaaaagtggcagaagaaagtaaacaagcagtagtagaacaaaaagcaaatgatgtaaagacagctccaacaatgactgaatttgtaggaacagcaggaggggatacagtaggcctggttatagctaatgtagacagcctgttgcataagcatttaggcttagataatacatgccgttcaataggcataataagtgccagagtaggggcacctgctcaaatgatggctgcagatgaggcagttaaaggtacaaatacagaagtggcaactattgaactaccaagagatacaaaaggcggagcaggacatggtatatttattgttttgaaagcggcagatgtatctgatgctagaagggcagtggaaattgcacttaaacaaacagataaatatttaggaaatgtttatctttgtgatgctggccatctggaagttcaatatactgcaagggcaagtttaatatttgaaaaggcttttggagctccatcagggcaggcctttggtatcatgcatgcagctccagcaggggttggaatgatagtagcagatacagcattaaaaacagcagatgtaaaactaattacttatggcagtcctactaatggcgtactgtcatatacaaatgaaattcttatcactataagtggggattcaggtgctgttttgcaatctttaactgctgctagaaaagctggattgtccattttaagatcaatgggacaagatcctgtttctatgtctaaacctactttttaa

SEQ ID NO: 1032 - protein, 304 aa, Clostridium kluyveri
MNNELIEKVLGEVRKSLDLKNFDQEKLNKVVESTTEKLSDSKKEEAIKEAKPDVKVAEESKQAVVEQKANDVKTAPTMTEFVGTAGGDTVGLVIANVDSLLHKHLGLDNTCRSIGIISARVGAPAQMMAADEAVKGTNTEVATIELPRDTKGGAGHGIFIVLKAADVSDARRAVEIALKQTDKYLGNVYLCDAGHLEVQYTARASLIFEKAFGAPSGQAFGIMHAAPAGVGMIVADTALKTADVKLITYGSPTNGVLSYTNEILITISGDSGAVLQSLTAARKAGLSILRSMGQDPVSMSKPTF

SEQ ID NO: 1033 - DNA, 1476 bp, Clostridium kluyveri
atggagataatggataaggacttacagtcaatacaggaagtaagaactcttatagcaaaagcaaagaaagctcaagcagaatttaaaaatttttctcaagaagctgtaaacaaggtaatagaaaaaatagctaaggctacagaagttgaagctgtaaaacttgcaaaattggcatatgaagatacaggatatggaaaatgggaagataaagtaataaagaataagttttcaagtatagtagtttataactatattaaagatttgaaaacggttggaattttaaaagaagacaaggaaaagaaattaatagatatagctgttccacttggagttatagcaggacttataccttcaactaacccaacttcaacagcaatattcaaggtattaatagcattaaaggcaggaaatgcaatagtattctcaccacatccaacagcagtaagaagtattacagaaactgtaaagataatgcagaaagctgcagtagaagcaggagcaccagatggattaatccaatgtatgtcaatattgacagtagaaggtactgctgaattgatgaagaataaggatacagcacttatccttgcaacaggtggagaaggaatggtaagagcagcttacagttcaggaacaccagctataggagttggacctggaaacggcccatgctttattgaaagaacagcagatattcctacagcagtaagaaaagtaataggcagtgatacttttgataatggagtaatatgtgcttcagaacaatcaataatagcagagacagtaaagaaagcagagataattgaagaattcaagagacaaaaaggatatttcttaaatgcagaagaatcagaaaaagtaggcaagattttattaagagctaatggaacaccaaacccagcaatagtaggaaaagatgttcaagcattagcaaaattagcaggaataagcataccaagcgatgcggtaatattactttcagagcagacagatgtgagtccaaagaacccttatgcaaaggaaaaattagctccagtacttgcattctatacagtagaagactggcatgaagcatgtgaaaaatccttagcacttcttcataaccaaggaagtggacatacattaataattcactcacagaatgaagaaatcataagagaattcgcattgaagaaaccagtatcaagaatacttgtaaattcacctggatcacttggaggaataggtggagctacaaatcttgtaccatcacttacattaggctgtggagcagtaggtggaagtgcaacttcagataacgtaggaccagaaaacttattcaacataagaaaagtagcttatggaactacgacagtagaagaaataagagaagcttttggtgtaggagcagcttcatcaagtgcaccagcagaaccagaagataatgaagatgtacaggctatagtaaaagctataatggctaaattaaatctttaa

SEQ ID NO: 1034 - protein, 491 aa, Clostridium kluyveri
MEIMDKDLQSIQEVRTLIAKAKKAQAEFKNFSQEAVNKVIEKIAKATEVEAVKLAKLAYEDTGYGKWEDKVIKNKFSSIVVYNYIKDLKTVGILKEDKEKKLIDIAVPLGVIAGLIPSTNPTSTAIFKVLIALKAGNAIVFSPHPTAVRSITETVKIMQKAAVEAGAPDGLIQCMSILTVEGTAELMKNKDTALILATGGEGMVRAAYSSGTPAIGVGPGNGPCFIERTADIPTAVRKVIGSDTFDNGVICASEQSIIAETVKKAEIIEEFKRQKGYFLNAEESEKVGKILLRANGTPNPAIVGKDVQALAKLAGISIPSDAVILLSEQTDVSPKNPYAKEKLAPVLAFYTVEDWHEACEKSLALLHNQGSGHTLIIHSQNEEIIREFALKKPVSRILVNSPGSLGGIGGATNLVPSLTLGCGAVGGSATSDNVGPENLFNIRKVAYGTTTVEEIREAFGVGAASSSAPAEPEDNEDVQAIVKAIMAKLNL

SEQ ID NO: 1035 - DNA, 1215 bp, Clostridium kluyveri
atgagtacatttagcattaagcctactgtattctttgatgaaggttcagtagaataccttaataatttaaaagaacaaaatgaggggcttatcatatgttgtgatgaaggttccatagattacttaaataacttggctggaaaaagagctcttatagtaacagacccatttatggttaaatcaggagctgtaaataagataacagatatattcaagagaattaatgtagattatgaaatatttgcagaaatagtgccagatccaccagttagtatagttgcagacggagtaggacgtatgatagctttcaaacctgatgcattgattgcactaggcggaggttcttcaattgatgcaacaaagagtataatggcattttgtttaaagatattaaagaacaaaggcgatgcatcaggatataaaaaaccattgtttatagcagtaccaactacaagtggtacaggttcagaagttacagctttctcaataatcacaacaggaaagaaaaaagtagctttaattgaccaaggattaataccagatgtagcaatattggatgcagactttgttaagacagtaccaagcagaataacagcagatactgcaatagacgttataactcacggagtagaagcttatgtttcaactattgcttcagacttcactgatgcatttgcagaaaaagctataaagacagtattccagtatttattaaaagcatatgcaaatggcggagacctagaagcaagagaaaaattgcacaatgcatcctgtatggcaggtatggcatttacaaatgcaggacttggaatcaaccacagtttggcacatatattaggagcaactttccatgtaccacatggtagagcaaacgcaatagttatgccttatgttataaaatataatgcaaacttagaaagtggagtagaaacaagagcagcaaagagatacagagaaatagcagaattcttaggattacctgcttcaactgtaaaagaaggagtaacaagtcttatatgtgcaataaacgtgcttaagaaagagactaatactcctatgaacataaaagaagctggagtaagcagagaagaattcatgagtaaagtagactttatgggagaaattgcacttgcagacaggtgtacacctaacaatccaagagttcctactaaggaagatttaattgcagtatttaaagaagcttatggtgactag

SEQ ID NO: 1036 - protein, 404 aa, Clostridium kluyveri
MSTFSIKPTVFFDEGSVEYLNNLKEQNEGLIICCDEGSIDYLNNLAGKRALIVTDPFMVKSGAVNKITDIFKRINVDYEIFAEIVPDPPVSIVADGVGRMIAFKPDALIALGGGSSIDATKSIMAFCLKILKNKGDASGYKKPLFIAVPTTSGTGSEVTAFSIITTGKKKVALIDQGLIPDVAILDADFVKTVPSRITADTAIDVITHGVEAYVSTIASDFTDAFAEKAIKTVFQYLLKAYANGGDLEAREKLHNASCMAGMAFTNAGLGINHSLAHILGATFHVPHGRANAIVMPYVIKYNANLESGVETRAAKRYREIAEFLGLPASTVKEGVTSLICAINVLKKETNTPMNIKEAGVSREEFMSKVDFMGEIALADRCTPNNPRVPTKEDLIAVFKEAYGD

SEQ ID NO: 1037 - DNA, 1476 bp, Clostridium kluyveri
atggagataatggataaggacttacagtcaatacaggaagtaagaactcttatagcaaaagcaaagaaagctcaagcagaatttaaaaatttttctcaagaagctgtaaacaaggtaatagaaaaaatagctaaggctacagaagttgaagctgtaaaacttgcaaaattggcatatgaagatacaggatatggaaaatgggaagataaagtaataaagaataagttttcaagtatagtagtttataactatattaaagatttgaaaacggttggaattttaaaagaagacaaggaaaagaaattaatagatatagctgttccacttggagttatagcaggacttataccttcaactaacccaacttcaacagcaatattcaaggtattaatagcattaaaggcaggaaatgcaatagtattctcaccacatccaacagcagtaagaagtattacagaaactgtaaagataatgcagaaagctgcagtagaagcaggagcaccagatggattaatccaatgtatgtcaatattgacagtagaaggtactgctgaattgatgaagaataaggatacagcacttatccttgcaacaggtggagaaggaatggtaagagcagcttacagttcaggaacaccagctataggagttggacctggaaacggcccatgctttattgaaagaacagcagatattcctacagcagtaagaaaagtaataggcagtgatacttttgataatggagtaatatgtgcttcagaacaatcaataatagcagagacagtaaagaaagcagagataattgaagaattcaagagacaaaaaggatatttcttaaatgcagaagaatcagaaaaagtaggcaagattttattaagagctaatggaacaccaaacccagcaatagtaggaaaagatgttcaagcattagcaaaattagcaggaataagcataccaagcgatgcggtaatattactttcagagcagacagatgtgagtccaaagaacccttatgcaaaggaaaaattagctccagtacttgcattctatacagtagaagactggcatgaagcatgtgaaaaatccttagcacttcttcataaccaaggaagtggacatacattaataattcactcacagaatgaagaaatcataagagaattcgcattgaagaaaccagtatcaagaatacttgtaaattcacctggatcacttggaggaataggtggagctacaaatcttgtaccatcacttacattaggctgtggagcagtaggtggaagtgcaacttcagataacgtaggaccagaaaatttattcaacataagaaaagtagcttatggaactacgacagtagaagaaataagagaagcttttggtgtaggagcagcttcatcaagtgcaccagcagaaccagaagataatgaagatgtacaggctatagtaaaagctataatggctaaattaaatctttaa

SEQ ID NO: 1038 - protein, 491 aa, Clostridium kluyveri; identical to SEQ ID NO: 1034

SEQ ID NO: 1039 - DNA, 1308 bp, Clostridium kluyveri
atgagtacatttagcattaagcctactgtatgctttgaggaaggttcagtagaatatcttaataatttaaaggaacaaaatgaggggcttatcatatgctgtgattcaggttccatagattacttaaataacttggctggaaaaaaagctcttatagtaacagatccatttatggttaaatcaggagctgtaaataagataacagatatattcaagagaattaatgtagattatgaaatatttgcagaaatagtaccagatccaccagttgacatagttgcaaacggggtaggcagaatgatggctttaaggccagatgctttaatcgcattaggtggaggttcatccatagatgcaacaaaggctataatggcattttgtttaaagatattaaagaacaagggtgatgcatcaggatatacaaaaccgttgtttatagcagtaccaactacaagtggtacaggttcagaagttacatctttctcaataatcacaacaggagtgaaaaaagtagctttaattgaccaggcattaataccagatgtagcaatattggatgcagactttgttaagacagtaccaagcagaataacagcagatactgcaatagacgttataactcatggagtggaagcttatgtttcaactattgcttcagacttcactgatgcatttgcagaaaaagctataaaggcagtattccagtatctaccaaaagcatatgcaaatggcggagacatggaagcaagagaaaaattgcacaatgcatcctgtatggcaggtatggcatttacaaatgcaggacttggaatcaaccacagtttggcacacatattaggagcaactttccatgtgccacatggtagagcaaacgcaatagttatgccttatgttataaaatataatgcaaatttagaaggtggagtagaaacaagagcagcggagagatacagagaaatagcagaattcttaggattacctgcatctacagcaaaagaaggagtaacaagtcttatagctgcaataaataaacttaagaaagagactaatactcctatgaacataagtgaaactggaataagcaaagaagatttcctagctaaggtagattctatgggagcaattgctcttcaagacagatgtacacctaacaatccaagagttcctactaaggaagacttagttgcagtatttaaagaagcttttggtggaatagaagcagcttcatcaagtgcaccagcagaaccagaagataatgaagatgtacaggctataataaaggctataatgtctaaattaaatctttaa

SEQ ID NO: 1040 - protein, 435 aa, Clostridium kluyveri
MSTFSIKPTVCFEEGSVEYLNNLKEQNEGLIICCDSGSIDYLNNLAGKKALIVTDPFMVKSGAVNKITDIFKRINVDYEIFAEIVPDPPVDIVANGVGRMMALRPDALIALGGGSSIDATKAIMAFCLKILKNKGDASGYTKPLFIAVPTTSGTGSEVTSFSIITTGVKKVALIDQALIPDVAILDADFVKTVPSRITADTAIDVITHGVEAYVSTIASDFTDAFAEKAIKAVFQYLPKAYANGGDMEAREKLHNASCMAGMAFTNAGLGINHSLAHILGATFHVPHGRANAIVMPYVIKYNANLEGGVETRAAERYREIAEFLGLPASTAKEGVTSLIAAINKLKKETNTPMNISETGISKEDFLAKVDSMGAIALQDRCTPNNPRVPTKEDLVAVFKEAFGGIEAASSSAPAEPEDNEDVQAIIKAIMSKLNL

SEQ ID NO: 1041 - DNA, 1215 bp, Clostridium kluyveri
atgagtacatttagcatcaaacctactgtatgttttgatgaaggttcagtagaatatcttaataatttaaaagaacaaaatgagggacttatcatatgttgtgattcaggttccatagattacttaaataacttggctggaaaaaaagctcttatagtaacagacccatttatggttaaatcaggagctgtaaataagataacagatatattcaagagaataaatgtagactatgaaatatttgcggaaatagtaccagatccaccagttgacatagttgcaaacggagtaggcagaatgatggcttttaaaccagatgctttaatcgcattaggcggaggttcttcaattgatgcaacaaaggctataatggcattctgcttaaagatattaaagaaccaaggtgatgcatcaggatatgcaaaaccattgtttatagcagtaccaactacaagtggtacaggttcagaagttacatctttctcaataatcacaacaggagtgaaaaaagtagctttaattgaccaggcattaataccagatgtagcgatattggatgcagactttgttaagacagtaccaagcagaataacagcagatactgcaatagacgttataactcacggagtagaagcttatgtttcaactattgcttcagacttcactgatgcatttgcagaaaaagctataaagacagtattccagtatttattaaaggcatatgcaaatggcggagatatggaagcaagagaaaaattgcacaatgcatcctgtatggcaggtatggcatttacaaatgcaggacttggaatcaaccacagtttggcacacatattaggagcaactttccatgtgccacatggtagagcaaacgcaatagttatgccttatgttataaaatataatgcaaacttagaaagtggagtggaaacaagagcagcaaagagatacagagaaatagcagaattcttaggattacctgcttcaactgtaaaagaaggagtaacaagtcttatagctgcaataaatgtacttaagaaagagactaatactcctatgaacataagtgaagctggaataagcagagaagacttcatggccaaggtagattctatgggagcaattgctcttcaagacagatgtacacctaacaatccaagagttcctactaaggaagacttagttgcagtatttaaagaagcttttggtggctag

SEQ ID NO: 1042 - protein, 404 aa, Clostridium kluyveri
MSTFSIKPTVCFDEGSVEYLNNLKEQNEGLIICCDSGSIDYLNNLAGKKALIVTDPFMVKSGAVNKITDIFKRINVDYEIFAEIVPDPPVDIVANGVGRMMAFKPDALIALGGGSSIDATKAIMAFCLKILKNQGDASGYAKPLFIAVPTTSGTGSEVTSFSIITTGVKKVALIDQALIPDVAILDADFVKTVPSRITADTAIDVITHGVEAYVSTIASDFTDAFAEKAIKTVFQYLLKAYANGGDMEAREKLHNASCMAGMAFTNAGLGINHSLAHILGATFHVPHGRANAIVMPYVIKYNANLESGVETRAAKRYREIAEFLGLPASTVKEGVTSLIAAINVLKKETNTPMNISEAGISREDFMAKVDSMGAIALQDRCTPNNPRVPTKEDLVAVFKEAFGG

SEQ ID NO: 1043 - DNA, 273 bp, Clostridium kluyveri
atggtagcgatgggagaagctttgggaatggtggaggcaaaaggtttaataggagctatggaagcagcagatgagatgttgaaaaatggtgatgtcaaattactaggatatgaaaaagtaagtgcaggacttataacagtaaagataaaaggagatgtgggagcagtaaaggtagctacccaggcaggcgcggaagctgccaagagagtaggacagttattagctgtacatgtaattcccgcacctaagatagatgtggataaaattaagtga

SEQ ID NO: 1044 - protein, 90 aa, Clostridium kluyveri
MVAMGEALGMVEAKGLIGAMEAADEMLKNGDVKLLGYEKVSAGLITVKIKGDVGAVKVATQAGAEAAKRVGQLLAVHVIPAPKIDVDKIK

SEQ ID NO: 1045 - DNA, 471 bp, Clostridium kluyveri
atgaggaaaataatattatttggtagaagtggatgtggaaaaactactttgactcaggcattaagaggacaggatatagtttatcataagactcagtatatcaatcactatgatgcagttattgatactccaggggaatatgcagaaaataggtccctgggaagtgcacttgctatatattcctatgaggcagatgtagtagggcttttacttagtgccatagaaccttattctatatttccacctaatattgcaccttgtgtaaacagagaggttgtaggtatagtaacacagatagacaggtctgatgctaatgctaaccaagctgaatattggttgaagcttgcaggctgtaaaacaattttccgagtaagttcctatactagagagggaataggcaaggttttaaatcaccttagagaagatggagataatgtgtgttgggatgataatggtacattgagtaactga

SEQ ID NO: 1046 - protein, 156 aa, Clostridium kluyveri
MRKIILFGRSGCGKTTLTQALRGQDIVYHKTQYINHYDAVIDTPGEYAENRSLGSALAIYSYEADVVGLLLSAIEPYSIFPPNIAPCVNREVVGIVTQIDRSDANANQAEYWLKLAGCKTIFRVSSYTREGIGKVLNHLREDGDNVCWDDNGTLSN

SEQ ID NO: 1047 - DNA, 378 bp, Clostridium kluyveri
atggatttacaaaatatactggcacaagaaggtaaagtgagaattattcaggaaactgttccaggtaagcaaatcacaattgcacacataattgccagtcctgatgatattatatataaaaaactaggattaaatcctaccattgattatggcaaggcagctattggaattgtatgtatgagccccagcgaaactgcaatcattacaggagacattgcttctaaagcagctaacatagacattggctttgtagatagattcagtggaacgcttattataacaggaggagttgcagaagttgagtctgctatgaaagcagttgcaaattattgcagggacaagcttttttttacagtatgtgaaataacaagaacgtag

SEQ ID NO: 1048 - protein, 125 aa, Clostridium kluyveri
MDLQNILAQEGKVRIIQETVPGKQITIAHIIASPDDIIYKKLGLNPTIDYGKAAIGIVCMSPSETAIITGDIASKAANIDIGFVDRFSGTLIITGGVAEVESAMKAVANYCRDKLFFTVCEITRT

SEQ ID NO: 1049 - DNA, 549 bp, Clostridium kluyveri
atgaaaaaatttgtttgtacagtatgtggttatgttcatgagggggatacacctccagcaaaatgtcctgtttgtggtgcaccagcagaaaagttcatggaaaagaaagaagctggagcaatcagttgggcagatgagcatgtaataggtgttgcaaaagatgtggatccaaaagtagtagaagaattaagagctaactttacaggagaatgttcagaggttggaatgtatttagctatgagccgtcaggcagatagagaaggatatccagaagttgcagaagcatataagagaatagcttttgaagaagcagaacatgctgctaaatttgctgaattactaggagaagttgtagtggcagatacaaagaaaaatttacagatgagagtagatgcagaagaaggagcctgtaaggggaaaaaggatttagcaactcttgctaaacaattaaactatgatgcaattcatgatacagtgcatgaaatgtgtaaagatgaagcaagacacggaagtgcattccagggattgttaaatagatattttaaatag

SEQ ID NO: 1050 - protein, 182 aa, Clostridium kluyveri
MKKFVCTVCGYVHEGDTPPAKCPVCGAPAEKFMEKKEAGAISWADEHVIGVAKDVDPKVVEELRANFTGECSEVGMYLAMSRQADREGYPEVAEAYKRIAFEEAEHAAKFAELLGEVVVADTKKNLQMRVDAEEGACKGKKDLATLAKQLNYDAIHDTVHEMCKDEARHGSAFQGLLNRYFK

SEQ ID NO: 1051 - DNA, 987 bp, Clostridium kluyveri
atgttatatccaattaagttcgaaaacttatattacagtaaaatttggggaggaagagatctggaactctttagaagtaatctgccggagggaaaaataggggaaagctgggatatagcatgtcacaaaaatggtatgggaatagtagcaaatggaaagttaaagggtgctaggtttgatgagcttattttaaagggaggagagaggtttttaggaagaaaaattaaattggatagatttccacttctagtaaaactcattaatgccagagataaactttctatacaagttcatcctgataatatatacgccaataatgtggaaaaggattggggaaaatcggaagtctggtatgtaatggaggcagctgaaggagccagcttgatactaggtactaaaaatataacaaatggagatgaacttaaaggtgccattacacggggaattctagaaaaacatttaaataaggtgcttgtaaatagaggagatgtatattttataaaaagtggacttgttcatgctataggggcaggagtaattgtagcagaaattcagcaaaatagtgatataacctatagaatttatgattatggaagagaaagggagctccatatcgaaaaagctctacatgtaatagactttaacttaaaaggagaaaaaagcatgggggttacgctgaaaagaaaaggctgtgaaaaaacttatttatgtctttgtagggaattttccttagaattatataatattcatacagaggtggcagaggaaagtgatgaggagagattttatatatttacatgtgttcggggttatggaaacttaatatataaaggaggagtgcttcctgtatttacaggagacagtgtgcttgttcccgcgtttttggggagatatatattaagaggagatatggatatattaaaaagctatgtacctgattgcaacaaagtagaaaaagaaatattaaaagaaataaaaaaattttaa

SEQ ID NO: 1052 - protein, 328 aa, Clostridium kluyveri
MLYPIKFENLYYSKIWGGRDLELFRSNLPEGKIGESWDIACHKNGMGIVANGKLKGARFDELILKGGERFLGRKIKLDRFPLLVKLINARDKLSIQVHPDNIYANNVEKDWGKSEVWYVMEAAEGASLILGTKNITNGDELKGAITRGILEKHLNKVLVNRGDVYFIKSGLVHAIGAGVIVAEIQQNSDITYRIYDYGRERELHIEKALHVIDFNLKGEKSMGVTLKRKGCEKTYLCLCREFSLELYNIHTEVAEESDEERFYIFTCVRGYGNLIYKGGVLPVFTGDSVLVPAFLGRYILRGDMDILKSYVPDCNKVEKEILKEIKKF

SEQ ID NO: 1053 - DNA, 447 bp, Clostridium kluyveri
atgaaaattgtaatggtaatagggaaaacaggctcgggaaaaaccactttatgtaaggctataagtggacaggatgtaagtattgaagaaatgagctatagaagtactcaaactacagatattataaatggtacatttatagatacaccgggacaatatatagaaaacaagtggtatggatcacttacaattatttcagcggattgtgatattatggctatttgtcaggattgtacaagtatggaaagtgtatttcctccaagctttgccggcatatttgctaaacctgttataggtataataactaagatggatctttgtgaggatatggatagtgttaaaatggtagaagaaatgttaagcatggcaggagcagagactatatttaaagttagtagtttaagcaaagttggttttgaagaaataaaaaaatatattaaaaattaa

SEQ ID NO: 1054 - protein, 148 aa, Clostridium kluyveri
MKIVMVIGKTGSGKTTLCKAISGQDVSIEEMSYRSTQTTDIINGTFIDTPGQYIENKWYGSLTIISADCDIMAICQDCTSMESVFPPSFAGIFAKPVIGIITKMDLCEDMDSVKMVEEMLSMAGAETIFKVSSLSKVGFEEIKKYIKN

SEQ ID NO: 1055 - DNA, 276 bp, Leptotrichia buccalis  GRE type of compartment
atggcaacattaaatgcgttaggaatgatagaaacaaaaggattagtagctgcaatagaagcagcggatgcaatggtaaaagctgcgaatgtgacattaattgggaaagaacacgtaggtggaggacttgtaacagtgcttgtaagaggagatgtaggggctgttaaggctgcaactgatgcaggggctgctgctgctgaaagagtgggagaactagtttcaattcatgtaattccacgtccacattcagaagttgaaactattttaccaagataa

SEQ ID NO: 1056 - protein, 91 aa, Leptotrichia buccalis  GRE type of compartment
MATLNALGMIETKGLVAAIEAADAMVKAANVTLIGKEHVGGGLVTVLVRGDVGAVKAATDAGAAAAERVGELVSIHVIPRPHSEVETILPR

SEQ ID NO: 1057 - DNA, 276 bp, Leptotrichia buccalis  GRE type of compartment
atggcaacattaaatgcactaggaatgatagaaactaaaggattagtagctgcaatagaagcagctgatgcgatggtaaaagctgcgaatgtgacattgattggaaaagaacacgtaggtggaggacttgtaacagtgcttgtaagaggagatgtaggagctgttaaggctgcaactgatgcaggggctgctgctgctgaaagagtaggagaactgatttcaattcatgtaattccgcgtccacattcagaagttgaaacaatattgcctagatag

SEQ ID NO: 1058 - protein, 91 aa, Leptotrichia buccalis  GRE type of compartment
MATLNALGMIETKGLVAAIEAADAMVKAANVTLIGKEHVGGGLVTVLVRGDVGAVKAATDAGAAAAERVGELISIHVIPRPHSEVETILPR

SEQ ID NO: 1059 - DNA, 351 bp, Leptotrichia buccalis  GRE type of compartment
atggaagaagaaaaaaaacagagaatgatacaggaatatgtgcccggtaggcaattgacactggctcatataattgcaaatcctcaaagagatttatcaaaaaaaatagggcttcatgaaaacaaggtaaatgccatcggaattttaacaatcactccaggagaagcggcaataattgcggcagatttggctacaaagagtgctgaagtggagataggatttgtcgatagatttactgggtctgttgttattagtggagatgttggaagtatagaagctgctgtaaatgaagtagtttcatactttcaaaatgtactaagatttagtataactcaaataacgaggtcataa

SEQ ID NO: 1060 - protein, 116 aa, Leptotrichia buccalis  GRE type of compartment
MEEEKKQRMIQEYVPGRQLTLAHIIANPQRDLSKKIGLHENKVNAIGILTITPGEAAIIAADLATKSAEVEIGFVDRFTGSVVISGDVGSIEAAVNEVVSYFQNVLRFSITQITRS

SEQ ID NO: 1061 - DNA, 435 bp, Leptotrichia buccalis  GRE type of compartment
ttgaaaaaaatacttttaattggaaagtccatgtgtggtaaaacaacattgactcaaagaatacatggattggacatagaatatgaaaaaactcaaatgcttacatattcaaatgatatacttgacactcccggtgaatatatggaaaatagaatgctttacaaagcattaattgtaagttcctatgactgtgatgttgtaggaatggtgcaagcctgcgatgaagagcgtaatatatttcccccaaactttgcaacagccttttcaaagcctgtaattggaattgtaaccaaaactgatttaggtggaaatcctgaaaaagcaaaagaaatattggaaatggcgggagcggaaaaagtttttattgtaagtgcttatgaaaataaaggaattgaggaacttgtcaaatatctggaagaagattccgagagttag

SEQ ID NO: 1062 - protein, 144 aa, Leptotrichia buccalis  GRE type of compartment
MKKILLIGKSMCGKTTLTQRIHGLDIEYEKTQMLTYSNDILDTPGEYMENRMLYKALIVSSYDCDVVGMVQACDEERNIFPPNFATAFSKPVIGIVTKTDLGGNPEKAKEILEMAGAEKVFIVSAYENKGIEELVKYLEEDSES

SEQ ID NO: 1063 - DNA, 735 bp, Leptotrichia buccalis  GRE type of compartment
atggattcatacggatacgtagaaacactaggtcttgtaactgcaatagaagcagcggatgccgcattgaaagccgctaatgtaactcttatgaactgctattatgtaaaaggcggaattgtaacgattgaagtagcaggagatgtgtcggctgtaacagcagcagttgatgccgctacggaaagtgcaaaaagacttggtaatttcctgagcagtaatgttatcgcaagaattgattcggaaacaaaaaaaatcttgataagtgatttaggaaataaggagaaaaaacaaaaaattgaaaacaaatcagttgttaaagatacaactattgagaaaaaagcaacggaaaaaatttcaaccgaagaaataacagaagaaataataaatgaaagtaaaaatgaaaattttgacgaagaacaaaataaagaaataaatgaaaaagttacagagatagctgaagtttatgaaaaagttgaaaatccagctgaaaaattagatcaaaataatgatattcaggaaaaaatagaagttttcgaaatagaagttgaaaaagaagatgatgaagcagaaaaattaaaaaagcaatatcagggtatgaaagtaattgatttaaaaaaaatggtaaatagctgcaaattaggctacacttggaatcaaataaaaacaatgcctaagaaaaaactgatagaaattttgataaaaaataataaggaggaagcacaatggcaacattaa

SEQ ID NO: 1064 - protein, 244 aa, Leptotrichia buccalis  GRE type of compartment
MDSYGYVETLGLVTAIEAADAALKAANVTLMNCYYVKGGIVTIEVAGDVSAVTAAVDAATESAKRLGNFLSSNVIARIDSETKKILISDLGNKEKKQKIENKSVVKDTTIEKKATEKISTEEITEEIINESKNENFDEEQNKEINEKVTEIAEVYEKVENPAEKLDQNNDIQEKIEVFEIEVEKEDDEAEKLKKQYQGMKVIDLKKMVNSCKLGYTWNQIKTMPKKKLIEILIKNNKEEAQWQH

SEQ ID NO: 1065 - DNA, 306 bp, Leptotrichia buccalis  GRE type of compartment
atggcaacattaaatgcgttaggaatgatagaaactaaaggattagtagcggcaatagaagctgcagatgcgatggtaaaagcagccaatgtaacattgattgggaaagagcatgttggtggcggattagtgacagtattggtaagaggagatgtgggagcggtgaaagctgcaactgatgcgggagctgctgctgcagaaagagtaggagaattgatttcaattcatgtaattccaagacctcatactgaaattgaagctatattgcctaaagcaaaaacagttgaagaagctgtaacagaatag

SEQ ID NO: 1066 - DNA, 1479 bp, Leptotrichia buccalis  GRE type of compartment
atggataaagatttgcaatcgatacaggaagtaagagatttgcttgctgctgcgagtaaagcttttgaagaatacagccaattttctcaaagccagattgatgaaatagttaaggaaatctgtgaagaagctcaaaaacacgaagtagaactggcaaaattggctaatgaagaaacaggatttggacgttgggaagataaggtgctaaaaaatagactagcgtcagtaggtgtttatgaaactataaaagatttaaaaacaagaggaatcattaacgacgataaagaaaaaagaataacagaaataggggttccaatgggaataatcgcagcattaattccttctacaaaccctacgtctacaacaatatacaaaataatgatttcattaaaagcaggaaatgcggtaattgtaagtccgcatccaaatgcgaaagactctatattaaaaaccgcagaatatttaataagagctgctgaaagaaaaggtgctccaaaaggattaattggagttataaaaacacctacattacaagctacacaagagcttatgaaacataaaaagacttcattgattttggcaacaggtggagaagcaatggtaaaggctgcttacagttctggaacacctgctataggagtaggacctggaaatggaccttcatttattgaaagaagtgcagacattagaaaagcagttaaaagaataatagacagtaaaacttttgacaatggagtaatttgtgcgtcagaacagtcaattgttacagaagaagtaataaaacatcaagttgcagatgaactgaaacgacaaggcgcatatttcttgaacaaggatgaaagagaaaaagttggaaaaattctaatgagagccaacaacacaatgaatccaaaaatagtaggaaaaacagccttatatgtagctgcaatggcgggaataacagttcctgtaactacaaaagttctaatttctgaagaaacagaagtttcacacttcaatccttattcaagggaaaaattgtgtccagtactaggattttatacagaagaaacttgggaaaaagcatgtgaaaaatgtatagaaattcttcaaaacgaaggaatcgggcatacaatgtcaatgcacacaaacaacgaaaatatcataagagaattttcattgaaaaaaccagtttcaagattgcttgtaaacacacctgcggcacttggaggagtaggagctacgacaaatcttatacctgcattcacattaggatgtggaacagttggaggaagtgcaacttctgacaatataggacctctaaatctaataaatattagaagagtagcttatgggacaaaagagctggaagaattgaaaaatgaaggtgtttgtacttgtgcatgtgaattaaatactgacactagtaattcaaaagttagcgaaaatgatatagaaagtatcataagacaagtattggatggaatttataaaaaatag

SEQ ID NO: 1067 - protein, 101 aa, Leptotrichia buccalis  GRE type of compartment
MATLNALGMIETKGLVAAIEAADAMVKAANVTLIGKEHVGGGLVTVLVRGDVGAVKAATDAGAAAAERVGELISIHVIPRPHTEIEAILPKAKTVEEAVTE

SEQ ID NO: 1068 - protein, 492 aa, Leptotrichia buccalis  GRE type of compartment
MDKDLQSIQEVRDLLAAASKAFEEYSQFSQSQIDEIVKEICEEAQKHEVELAKLANEETGFGRWEDKVLKNRLASVGVYETIKDLKTRGIINDDKEKRITEIGVPMGIIAALIPSTNPTSTTIYKIMISLKAGNAVIVSPHPNAKDSILKTAEYLIRAAERKGAPKGLIGVIKTPTLQATQELMKHKKTSLILATGGEAMVKAAYSSGTPAIGVGPGNGPSFIERSADIRKAVKRIIDSKTFDNGVICASEQSIVTEEVIKHQVADELKRQGAYFLNKDEREKVGKILMRANNTMNPKIVGKTALYVAAMAGITVPVTTKVLISEETEVSHFNPYSREKLCPVLGFYTEETWEKACEKCIEILQNEGIGHTMSMHTNNENIIREFSLKKPVSRLLVNTPAALGGVGATTNLIPAFTLGCGTVGGSATSDNIGPLNLINIRRVAYGTKELEELKNEGVCTCACELNTDTSNSKVSENDIESIIRQVLDGIYKK

SEQ ID NO: 1069 - DNA, 783 bp, Leptotrichia buccalis  GRE type of compartment
atgcctgttataacagaaggaatgcttagaaaattagaaaaggaagggcatcttgaaaaagtacgaataactgaaaaagacatccttacaccatcagccagagaatatttaaatgtgaaaaaaattgattatcgaattaaaaaatctcaggaaaaagctatagagaaaaaagaaaacgatgaaaaaaaatctgaagtttctcaagtcaagaaatctgaagaaaaaatttctccaaaaagacaatacagagattattttacaggagcaatttacgacaaaaaacctgaatatatgactcagctttttggagacaatctagttgtaaaaaatcataagagaattattttaagaggaaaatttgatattttacaggctgaaataataaaatattggaaaaaatatgaaaaaaataaaaagctggaaagtgattttgcacagacatacagatttgtaagagatttattcataagtgaaatgacagatatggaatttcaggaaaggaatgttctaggatacgatatagatacattaaaagacataactcataatacagtaaaatattttaagacggggcatttgtttgaaataaatatagattatgatgaatcagttatagatttaaattatctgagagctctttcaagggaatgtgagcttgctgcggtggaagctttttacaaggaaggaaaagtggaaaggctggatatgctgaaagcattgaaccgtttgagcagtatattgtacttgatgatgctaaaagcaaataatggagattataaataa

SEQ ID NO: 1070 - protein, 260 aa, Leptotrichia buccalis  GRE type of compartment
MPVITEGMLRKLEKEGHLEKVRITEKDILTPSAREYLNVKKIDYRIKKSQEKAIEKKENDEKKSEVSQVKKSEEKISPKRQYRDYFTGAIYDKKPEYMTQLFGDNLVVKNHKRIILRGKFDILQAEIIKYWKKYEKNKKLESDFAQTYRFVRDLFISEMTDMEFQERNVLGYDIDTLKDITHNTVKYFKTGHLFEINIDYDESVIDLNYLRALSRECELAAVEAFYKEGKVERLDMLKALNRLSSILYLMMLKANNGDYK

SEQ ID NO: 1071 - DNA, 636 bp, Leptotrichia buccalis  GRE type of compartment
atggacagaaatgaattggagagaataataagagaaaaattacaggaaattctaggtgcagaaaaggatgatacctttatggttgaggcttcagggcgtcatgtacatcttacgaaggagcatgtggaagcactttttggaaaaggttatgaacttactccagcaaaggatttatcacagccaggacaatttgcggcaaaggaaagagtcagagtgattggtccaaaaggagaattttccaatgttgtagtattaggaccttgcagaagtttttcgcaagtggaattatcgcttactgactgccgtcaaataggagtcaagggagtgataagggaaagtggaaaaattgaaggaacgccgggaatactgctaggtgtaggagataaatatgtacagctggataaaggtgttattgttgccaaaagacatattcatatgacaaatgaagatgcaaaaagactttctgtaaaagacggcgaaactgtaaaagtgaaaattcacagtgacaggccgttaatatttgatgatgttttaataagagtaagggacagttttagactgagcatgcacatagactttgatgaagccaattcctgcgggtatacttcaggaatgactggaagtattgaaaaataa

SEQ ID NO: 1072 - protein, 211 aa, Leptotrichia buccalis  GRE type of compartment
MDRNELERIIREKLQEILGAEKDDTFMVEASGRHVHLTKEHVEALFGKGYELTPAKDLSQPGQFAAKERVRVIGPKGEFSNVVVLGPCRSFSQVELSLTDCRQIGVKGVIRESGKIEGTPGILLGVGDKYVQLDKGVIVAKRHIHMTNEDAKRLSVKDGETVKVKIHSDRPLIFDDVLIRVRDSFRLSMHIDFDEANSCGYTSGMTGSIEK

SEQ ID NO: 1073 - DNA, 645 bp, Leptotrichia buccalis  GRE type of compartment
atggatactcagaaattgatagaagtgcttgcaagggaagtgttaaaggaaattgccaaaagagaaaatcaaaaattatctgaaaataacgagattatttctaaaaaatcagtagtaacagcttttttgggaaatgatgaagttttgaaggatgaattgaaaaaagaagcatcatttatggaaaacataaaattagacagcacttgggaagaaatcggacaatgtgaaaataaaaaaagacttgtagtgtcaactcttgggataaatgagctgattgagctttcacaagggagaaaaagtgttataacggaatttctttttaacgatggggaagttgtacttgtggaagaagggctggaatataaaaaatataccaaacctgctgcattaatcaatctttatgacgggtatcttgataaagtcagggaatttggaataaaggttgtaaaaagaacggaagttaaaaatgttttttgtacgaaagaaaaagtttatttgaaaggcttggtaacagaaagaaggctcagaaagctgaaattaaaaaatcagacgcttgaagttgatgcaaaatctaaaataacttcccttgcgatggattatataaaagaaaatagtattgaattatgctatgaaagaaggcaataa

SEQ ID NO: 1074 - protein, 214 aa, Leptotrichia buccalis  GRE type of compartment
MDTQKLIEVLAREVLKEIAKRENQKLSENNEIISKKSVVTAFLGNDEVLKDELKKEASFMENIKLDSTWEEIGQCENKKRLVVSTLGINELIELSQGRKSVITEFLFNDGEVVLVEEGLEYKKYTKPAALINLYDGYLDKVREFGIKVVKRTEVKNVFCTKEKVYLKGLVTERRLRKLKLKNQTLEVDAKSKITSLAMDYIKENSIELCYERRQ

SEQ ID NO: 1075 - DNA, 270 bp, Leptotrichia buccalis  GRE type of compartment
atgttaattggaaaagttgtggataatgtctgggcaacaaggaaggatgaaaaactgaaaggactaaaactaatggtagttgaagtggaagggacagatgaaggacgtggaagcagaaaaatggtggcagcagattacattggtgctggacaagacgacaaagtgataattgttacaggaagttctgcaagacatatattcgatgctgaaaccccagtagatgcgactatcgtaggaataatagacagtttggaatcggaaaaggagtaa

SEQ ID NO: 1076 - protein, 89 aa, Leptotrichia buccalis  GRE type of compartment
MLIGKVVDNVWATRKDEKLKGLKLMVVEVEGTDEGRGSRKMVAADYIGAGQDDKVIIVTGSSARHIFDAETPVDATIVGIIDSLESEKE

SEQ ID NO: 1077 - DNA, 297 bp, Leptotrichia buccalis  GRE type of compartment
atgagaaaaagattgattacggtaaaaaatctttttgaatatgttcaagaaaatgaacttgtgattcaagctgatatgattattactccaggagcaaaggacataataagggataagggaattggagtaaaatatgaaaaatgttgctgtgaatcagaaagtaaaatgaaaaatgaaataaaaaaagactgtcagaattttgagaaaaaagttattgacataattacaaaagaatttaaaataacggattctgaaacagtccaaaaaatattatccaaattaaaagaattactataa

SEQ ID NO: 1078 - protein, 98 aa, Leptotrichia buccalis  GRE type of compartment
MRKRLITVKNLFEYVQENELVIQADMIITPGAKDIIRDKGIGVKYEKCCCESESKMKNEIKKDCQNFEKKVIDIITKEFKITDSETVQKILSKLKELL

SEQ ID NO: 1079 - DNA, 1119 bp, Leptotrichia buccalis  GRE type of compartment
atggggttatttcaaataaaaccggatattcattatggcgctaattctttggatatattaagaacactggaaatggaaaaagtatttttagttacagatgaaaatatggtaaaactgaaagtcataaataaagtgacaaatatcttaaaatcgcgaggaatagaagccaaagtatattcggatgtgaagcctgatcccactgatgaggaaattataaagggaatgctggaattaagtgcacatgatcccgactgcataatagcacttggaggaggttcaccaatagatgcctgcaaatcaatgatttattttacaaatcagataaaaagggcaatgggacaaaataaaaagccaaaattcattgctattccaacaacgagcggaacaggttcagaagtgacatcttatgcagttgttacaacgaaagataaaaaaataccgctaagcgatagcgaaatgctgcccgatatagcaatcttaaatccagaatttataaaaactctttcaccatcaataattgcggacacaggaatggatgttttgacacatgctatagaagcatatgtttcaaaatctagaaacttatttacaaatacatttgccattggagcgataaagacagtatttgctgacttggtaagtaattttgaaaatccgcaactggaaaaagaaagaattaatttacagattgcctcttgtatggcgggagttgcatttagtaatgcaggattgggaataaatcacagcatagcacattctctgggagcaagatttcataaaccgcatggaagattaaatgctgtaatcatgtcagaagttatacaatttaatgcacgaaataaaaatgcggcaaaatattacagggaaattgtggaagcgttaggattttctcctaaagaagatgtagaaggtgtggagatactggcaaaggctattaaaatgagagcagctaaaatgggaataccaaacagtttaagtgaacttggaatcccgaaagaacaatattttgatgaaatggaaggcataattgatcaaatagaaaatgatatgtgtacaggagaaaatccacgaagatttagcagaattgaaatgaagcagttattgacagatttatattaa

SEQ ID NO: 1080 - protein, 372 aa, Leptotrichia buccalis  GRE type of compartment
MGLFQIKPDIHYGANSLDILRTLEMEKVFLVTDENMVKLKVINKVTNILKSRGIEAKVYSDVKPDPTDEEIIKGMLELSAHDPDCIIALGGGSPIDACKSMIYFTNQIKRAMGQNKKPKFIAIPTTSGTGSEVTSYAVVTTKDKKIPLSDSEMLPDIAILNPEFIKTLSPSIIADTGMDVLTHAIEAYVSKSRNLFTNTFAIGAIKTVFADLVSNFENPQLEKERINLQIASCMAGVAFSNAGLGINHSIAHSLGARFHKPHGRLNAVIMSEVIQFNARNKNAAKYYREIVEALGFSPKEDVEGVEILAKAIKMRAAKMGIPNSLSELGIPKEQYFDEMEGIIDQIENDMCTGENPRRFSRIEMKQLLTDLY

SEQ ID NO: 1081 - DNA, 579 bp, Leptotrichia buccalis  GRE type of compartment
atgagaaaaataatagttgtagacgatgaaccgataacaagaatggatatttgcgagatacttagggaagcaaattacgatgtagttgctgaggcaggagatggatttgatgcaatagaacaaagcagaaaatataaaccagattttgtaataatggatattaaaatgcctatactggacggactgaaagcagcgaaagtaataacaaaggagaaattgtctagaggtgttgttttacttacagcctattccagtaaggattttatagaagaagctaaaaatataggaataataggatatattgtaaagcctattgatgaaaaatcttttattccaaatcttgaaattatatttaacaagcaagaagaattcgaggaactggaaaaaaaatatttaaaaacgagtcaaaaactggaagacagaaaaaaaatagatattgccaagagtattctgatgaaaacaagagattttacggaaaaggaggcatacgagtatataaggacgcttagcatgaataaaagatgcgatatgggaaaaatatctgatattataattttatctggagatgaaaatgcttag

SEQ ID NO: 1082 - protein, 192 aa, Leptotrichia buccalis  GRE type of compartment
MRKIIVVDDEPITRMDICEILREANYDVVAEAGDGFDAIEQSRKYKPDFVIMDIKMPILDGLKAAKVITKEKLSRGVVLLTAYSSKDFIEEAKNIGIIGYIVKPIDEKSFIPNLEIIFNKQEEFEELEKKYLKTSQKLEDRKKIDIAKSILMKTRDFTEKEAYEYIRTLSMNKRCDMGKISDIIILSGDENA

SEQ ID NO: 1083 - DNA, 1404 bp, Leptotrichia buccalis  GRE type of compartment
atgcttagaacgatatgtaaacaatatacaaacctttcaaataaagatattgaaaagctggaaaaaatatgtgaagggctgcctgttatgagcaagctgctaaaggcggacgtatttattgactgtatgacggaaaatagggatacggcgattgtggttgctgaagcaaatccaagaaaaggatcaagttacacccaaagcgttgtagggaaatttgcttatagaaaaaatgagccagcagtattaagaacactagaaactggacatccgtcaagagattataaagcattaacgcaagaaaataaaagcgttacacaaaatgtagtgcctataagaagtgatagaacaaatggagaagtgatagccgttcttatagttgaggaaggcatgaatgaagaaaatatcaataaggagctaagttttttaaacaatgcaactgatgacattcttatgagttccgttggaatgctgcgggagcgaaaaataattgactacattaatgatggaattataatttttaatgaagaaggcgtgtgcatatatgctaattctagagcgaaatatgtgtacaggaagataggctataaggattttttccttggagaaaagtttgacaatattgtaattgacaatgttgaatttgaagatgtgctaagtggacaagtcaaagaaaaatccgatataaatatctcaaatatggttttaagtctggaatatatcttggtaaaggaaacaaaaaatgttaaaaatgtagttttgtttattaaggacattaccgaaattaaaatcaaggaaaaagaacttgtcttaaaatcagttgtaatcaaggaaatacatcatagagtgaaaaataatttgcagacaatagcaagtttgcttaggatacaggcaagaaaaacagaggataaagctgtaaaggctgcatttagcgatagtattaacaggattttgagtatttcggtaactcacgagctgcttgctcaaaatggacttgatgagctgaaaataaaggaagtcataaataaaattctgaaaaattcggtgagagaaaatctggaagggcatctgaaattgaaaatagatgtaataggagataactttgaaattaattcagataaggctacaactattgcccttatagtgaatgaacttgtggaaaattgtataaagcatgcttttaagaagcgggacaaaggacatataacaattaaagtgaaaagaggagagatgaaatcccatatttccataagtgatgatggaattggaatggatgaaaaggactttgaaaaaggaagcattggactacgaatagtaaaaagtcttgtaaaggaaaaactttatggaaatctggatataaaaactggaaaaaaaggaactgaaataagttttggatttgaaaattga

SEQ ID NO: 1084 - protein, 467 aa, Leptotrichia buccalis  GRE type of compartment
MLRTICKQYTNLSNKDIEKLEKICEGLPVMSKLLKADVFIDCMTENRDTAIVVAEANPRKGSSYTQSVVGKFAYRKNEPAVLRTLETGHPSRDYKALTQENKSVTQNVVPIRSDRTNGEVIAVLIVEEGMNEENINKELSFLNNATDDILMSSVGMLRERKIIDYINDGIIIFNEEGVCIYANSRAKYVYRKIGYKDFFLGEKFDNIVIDNVEFEDVLSGQVKEKSDINISNMVLSLEYILVKETKNVKNVVLFIKDITEIKIKEKELVLKSVVIKEIHHRVKNNLQTIASLLRIQARKTEDKAVKAAFSDSINRILSISVTHELLAQNGLDELKIKEVINKILKNSVRENLEGHLKLKIDVIGDNFEINSDKATTIALIVNELVENCIKHAFKKRDKGHITIKVKRGEMKSHISISDDGIGMDEKDFEKGSIGLRIVKSLVKEKLYGNLDIKTGKKGTEISFGFEN

SEQ ID NO: 1085 - DNA, 1431 bp, Leptotrichia buccalis  GRE type of compartment
atgatagaagaaatattaagtgtgggaatagatattggaacttctactacgcagcttattttctcaaaaatttatatagaaaacagaggaactgcatttacagcgcctcagcttaaaataataggaaaagaagttgtatatagaagcgaaatttatattactccattagaaaatgaaacaaaaatagacgcaaaaaaagttaaggaaataatagaatctgaatacagaaaagccaatatacaatacaaggatgtttcgacaggagctgtaataataacaggagatactgcaagaaaggaaaatgcgaaggaagtactgcaaattcttagtggaatggcaggagatttcgtcgttgcaacagcaggacctgatttggaaagcattattgctggaaaaggttcgggagcttatggatattccgaacagaaaaatacaagtatcgtaaactttgacatcggaggaggaactacaaacattgtagttttcaatagaggggaagtggaagataccacttgtcttgacatcggaggaagacttataaaatttgatgaaaacgggaatacacgttatattttcaaaaaaatgtatgatattgctgatgatgtaaatataaaattggaattaggcagaaaaataaacgagcaggatttgagaaaaataacgagaagaatggcacagcttgttcttgaaagtattgaacttttgccaaaaacagatttgtaccataaaatagtaacatataaagatttcagaaaacataataacaacattgagcattattcatttactggaggagttgcagattttgtttatggaaaaactgaaaaggacttgtacaaatataacgatataggggtagtacttggagaggaactggtaaaagtcctaaaagagttaaatatagagcctctaaaattaagtgaaacaattggagcgacagtagttggtgcaggaagccatacgacagaaataagtggaagtacaataacttatactgaaggaatttttccaataaaaaatattcctgtattgaaactgtcagaatcggatgaaagtttgccacataatgaattaggaaaggttattgaagggaaactaaactggtttaattctgaaaatgaaattgaaaatgtagcacttgcctttaaagggaaacacaatatggcatataccgacataatggagctatcttcggtaatttcagatgttataaaaagaaaacataacaaaactcatcctgtaatcgttatagttgaaaacgatatggcaaaagtattgggacaatgtatgaaacttgcgcttgatggttacgatataatttgcatagacagtgtaaaagtgagagatggagattatattgacataggggcgccactaggaaatggaaatgtattgcctgttgtaataaaaacattggtattcagttattaa

SEQ ID NO: 1086 - protein, 476 aa, Leptotrichia buccalis  GRE type of compartment
MIEEILSVGIDIGTSTTQLIFSKIYIENRGTAFTAPQLKIIGKEVVYRSEIYITPLENETKIDAKKVKEIIESEYRKANIQYKDVSTGAVIITGDTARKENAKEVLQILSGMAGDFVVATAGPDLESIIAGKGSGAYGYSEQKNTSIVNFDIGGGTTNIVVFNRGEVEDTTCLDIGGRLIKFDENGNTRYIFKKMYDIADDVNIKLELGRKINEQDLRKITRRMAQLVLESIELLPKTDLYHKIVTYKDFRKHNNNIEHYSFTGGVADFVYGKTEKDLYKYNDIGVVLGEELVKVLKELNIEPLKLSETIGATVVGAGSHTTEISGSTITYTEGIFPIKNIPVLKLSESDESLPHNELGKVIEGKLNWFNSENEIENVALAFKGKHNMAYTDIMELSSVISDVIKRKHNKTHPVIVIVENDMAKVLGQCMKLALDGYDIICIDSVKVRDGDYIDIGAPLGNGNVLPVVIKTLVFSY

SEQ ID NO: 1087 - DNA, 1365 bp, Leptotrichia buccalis  GRE type of compartment
atggtattaaaaactaaattatttggacatacgtatgaatttaaatctgtaaaagatgtgcaaaataaagcaagtgaatttagatcaggagatgaacttgctggagtaagtgcaagcacagcggaagaaagagttgccgcaaaagctgtactggctgaattaacattgagagatttgagaaataatcctgcagtaccttatgaagaagatgaagttacaagaattatacaggatgctgtaaatgaaaaaatttatggagaaataaaaaactggactgtaagtgaattaagagaatggattttagactctcatacaagtggtgacgacataaagagaattagtaaaggtcttacaagtgaaatggtagcagcagttgctaaacttatgagtaacatggatcttattcaaggagcaagcaaaataagaattaaaaaattctgtaatactgaaataggtggagatggaatacttgcaacaagattgcagcctaatcacacaactgatgatccagatggaattatgctttctacgtatgaggggcttagctttgggcaaggagacgcattgttagggttaaacccagttgatgacagtgttgacagtgttatgagagtattgcacagatttcatgaaataaaaactaaatgggaaattcctacacaaatatgtgtattggctcatgtaactacacaaatggaagcagttagaagaggagcgcctacagacttgattttccaaagtattgcaggatctgaaaaaggaaatgaagcatttggtataactggagatatgattcaggaagcaagagaattggcattaaaacatggaacagcaacaggacctaacgtaatgtactttgaaacaggacaaggttcagaattatcatcagatgcacaccatggatgcgatcaggttacaatggaagcaagatgttacggatttgcgaaaaaatttgatccatttattgtaaatacggttgttggatttattggaccagaatatctttataacagcaaacaagtaataagagctggacttgaagatcattttatgggtaaacttacaggaatttcaatgggagttgacgcttgctacactaaccatatgaaagcggatcaaaatgatattgaaaacttgaaaatattattgacagttgctggatgtaactactttatggctattcctgcgggagacgacatcatgcttaactatcaaacatcttcttatcacgatgatgctacattaagagacatatgtaacagaagacctataaaaccttttgaacaatggttagaaaaaatgggaataatgaaagatggaaaacttacagatagagccggagatgcttcaattttcttaaaatag

SEQ ID NO: 1088 - protein, 454 aa, Leptotrichia buccalis  GRE type of compartment
MVLKTKLFGHTYEFKSVKDVQNKASEFRSGDELAGVSASTAEERVAAKAVLAELTLRDLRNNPAVPYEEDEVTRIIQDAVNEKIYGEIKNWTVSELREWILDSHTSGDDIKRISKGLTSEMVAAVAKLMSNMDLIQGASKIRIKKFCNTEIGGDGILATRLQPNHTTDDPDGIMLSTYEGLSFGQGDALLGLNPVDDSVDSVMRVLHRFHEIKTKWEIPTQICVLAHVTTQMEAVRRGAPTDLIFQSIAGSEKGNEAFGITGDMIQEARELALKHGTATGPNVMYFETGQGSELSSDAHHGCDQVTMEARCYGFAKKFDPFIVNTVVGFIGPEYLYNSKQVIRAGLEDHFMGKLTGISMGVDACYTNHMKADQNDIENLKILLTVAGCNYFMAIPAGDDIMLNYQTSSYHDDATLRDICNRRPIKPFEQWLEKMGIMKDGKLTDRAGDASIFLK

SEQ ID NO: 1089 - DNA, 942 bp, Leptotrichia buccalis  GRE type of compartment
atgttatcagaaagagaactaaaagacgtaattgaaaaaataataagcgaaataaaaatagaggaaacgccagcaaaagaaacacctgtcacagttatggaagaaaaaacaccagttgtcagcacaagttccacttatgaccaagatgaaaacccacgtgaaaatccacacattgtaaatggagaagtaagggatatcggaaaaataaatgtaaaagagcagatgcttgtggataatcctgaagacagggaagaatatatgaaattaaaacaaaaaacatctgcaaggctaggaatcggaagagctggaacaagaatgagaacggaagttttgttaagattgagagcagatcacgctgctgcacaagatgctgtatttaatgacgttcctacagaatttctagatgaacttggattatttgaaattactactgaatgtgaaagcagagaccaatatattacacgtcctgacttgggtagaaaaatttcgcaagaaggaataaaaatcatagaagaaaaatgtaaaaaaaatccaacagtgcaaatagtagtgtcagatggactaagttcaactgcgattgaagcgaatgctaaaaatataatacctgcaatgttaaatgggcttaaaggatatggaattgatactggtacgccgttctttatcaaatatggaagagttggagcgggagatcatgttggagaaatcttgaacgctgaagttgtgtgcatattaatcggagaacgtccgggacttacaactgcagaaagtatgagtgcctacattacttacaaggctcgtccaggaatttctgaagcaaaaagaacagttgtgtcaaatattcataaggatggaactccatcagcagaagcaggggcacacgttgcaacattaatcaagaaaataattgacgcaaaagcaagtggacaagatttgaaattataa

SEQ ID NO: 1090 - protein, 313 aa, Leptotrichia buccalis  GRE type of compartment
MLSERELKDVIEKIISEIKIEETPAKETPVTVMEEKTPVVSTSSTYDQDENPRENPHIVNGEVRDIGKINVKEQMLVDNPEDREEYMKLKQKTSARLGIGRAGTRMRTEVLLRLRADHAAAQDAVFNDVPTEFLDELGLFEITTECESRDQYITRPDLGRKISQEGIKIIEEKCKKNPTVQIVVSDGLSSTAIEANAKNIIPAMLNGLKGYGIDTGTPFFIKYGRVGAGDHVGEILNAEVVCILIGERPGLTTAESMSAYITYKARPGISEAKRTVVSNIHKDGTPSAEAGAHVATLIKKIIDAKASGQDLKL

SEQ ID NO: 1091 - DNA, 654 bp, Leptotrichia buccalis  GRE type of compartment
atgaaaggcgatagattaaaagctaatgtattagctgtgagattaattccgaatgtagatagtgatatggctaaagaattaggattgccaaacgaacatagaagtatagggattttgacggcagattgtgatgatgttacatatactgctttggatgaagctacaaaaaaagccgttgtggatgtagcttatggaaaatcattctacggtggagctgcaaatgcgaatacaaaactggctggagaagtaataggaattttatcaggacctactcctgctgaagtaaaaagcggacttgccgcagcagttgattttattgaaaatgaagcagcgtttataagtgcaaatgatgatgacagcatcgcatattttgcacattgcatatcaagaacaggaacttatttgtcaaaaactgcaggaattccagaaggtgaatctttggcttacttaatagcaccgccattagaagcaatgtatgctctggatgtcgcattaaaagctgctgatgtgagattggttgcattttatggaccgccttcagaaacaaactttggtggaggacttttgacaggaagccaatctgcatgtaaagctgcttgtgatgcgttcgctgaagctgtaaaatttgtagcagataatccattaaattattaa

SEQ ID NO: 1092 - protein, 217 aa, Leptotrichia buccalis  GRE type of compartment
MKGDRLKANVLAVRLIPNVDSDMAKELGLPNEHRSIGILTADCDDVTYTALDEATKKAVVDVAYGKSFYGGAANANTKLAGEVIGILSGPTPAEVKSGLAAAVDFIENEAAFISANDDDSIAYFAHCISRTGTYLSKTAGIPEGESLAYLIAPPLEAMYALDVALKAADVRLVAFYGPPSETNFGGGLLTGSQSACKAACDAFAEAVKFVADNPLNY

SEQ ID NO: 1093 - DNA, 1098 bp, Leptotrichia buccalis  GRE type of compartment
atgggaatagataaaataataattattattatgactatttttatggcaattggtggaatagataagatatttggaaataaactgggatatggtgaaaaatttgaagaaggaataatggctatgggttcacttgcggttgccatggtcgggattatttctttagcaccagttttaaaaaatcttttgacaccaatagtaggaccaatttattcagcattaggagcagatccggctatgtttgcaacaacacttcttgcaaatgatatgggaggagctccacttgcattagaaatggctaaaaatccagaagctggaagattagcggcatttatattaggttcgatgatgggaccaactatcgtgtttacaataccagtagcattaggaattattgaaaaagatgacaagccatttttggcaaaaggaattttagctggaattactacaataccgttaggagtacttgcaggtggattagtgtctggattcccgataggattgattttagtgaatttgataccaataataattgttgctacattaattattttaggtttaatttttatgcctgaaaaaatgacaaaaggatttgaagtttttggtcaagctgtggtaattataattacaatagggttagtggctgcaattattcaaaaattaacaggttttgttgtaattccagggatgaaatcaattgatgtaggattggaaacagttggaggaattgcaatagttttagctggagcatatccattggtacattttattacaaaagtatttggaaaaccacttgaagtattaggaaaaggacttggaatgaatgaagttggtgcggctggattagttgcaactttggctaataatattccaatgtttggaattttaaaagatatggatgcgaatggaaaagttatgaatattgcttttgcagtaagtgcggcattcgtctttggagaccatttaggatttacagctggatttgaaggtggaaagtatactcaaatgattttcccaatgatagttggaaaattagtggcaggagtaacagcgatagttgtagcaaaagtattattctgcaaaaaagaatctgcaaaataa

SEQ ID NO: 1094 - protein, 365 aa, Leptotrichia buccalis  GRE type of compartment
MGIDKIIIIIMTIFMAIGGIDKIFGNKLGYGEKFEEGIMAMGSLAVAMVGIISLAPVLKNLLTPIVGPIYSALGADPAMFATTLLANDMGGAPLALEMAKNPEAGRLAAFILGSMMGPTIVFTIPVALGIIEKDDKPFLAKGILAGITTIPLGVLAGGLVSGFPIGLILVNLIPIIIVATLIILGLIFMPEKMTKGFEVFGQAVVIIITIGLVAAIIQKLTGFVVIPGMKSIDVGLETVGGIAIVLAGAYPLVHFITKVFGKPLEVLGKGLGMNEVGAAGLVATLANNIPMFGILKDMDANGKVMNIAFAVSAAFVFGDHLGFTAGFEGGKYTQMIFPMIVGKLVAGVTAIVVAKVLFCKKESAK

SEQ ID NO: 1095 - DNA, 1146 bp, Leptotrichia buccalis  GRE type of compartment
atgaaatttaatgtgaaaaaattaattggattattggtatttttacttatggcattagtgttatcagctgccaatttagacgaattaaggtgggttcccaaaaatagggaagccttatcaaaacttatagatgaaaacaagaataaaggaaactatgttgtttttgactgggattatacatcaatttatcaagatactcaagaaaatctgtttagataccaaatagataatttgaaatttgaaatgacacctgctgccttttcaaaggcaattagaaaagatattccattagataattttgacaaggaatattcaaatgtgaaggggcaagctattaatattacaaaaatagcaaatgatttagataaaagatatactttcctttataataattatataaaagataaaaaaatgtctttgaaaaaaataaaagctacagaagaatttaaagactttagagggaaattggcatttctttatgaagcaataggtggaagtttttctcatgatattgcttatccatgggttctttacttgtttgataatatgactgtagaagaagtgcaaaaattggcaaaagaagctaatgattttggaataggaaataaacttgggaaatatgttcttgaatcaagtgacaagttaacaggtgaagctggaaaagtaaaatacgaatataagagtggattaagaactcagcctgaaacagctaatttatttcatgaatttgaaaaaaatggtataaaagtgtatatagtttaggcttctcttgaagatatagtaaaagttttcgcaagtgacaaatcttatggatataatttaagtcctgacagcgtttacggaatgcgtcttgaaatgaatggaaataaatatagagctgaatacaaacatggttatccacaaacacaaactaaaggaaaagttgaagtaataaacaaatacttaaaaccaaaacatggtggaaaagatcctattttagttgcaggtgacagtataggagatgctaacatgctttctgaatataaaggtacaaaaattttacttcttatgaaaagaaaaggaaaacttgacgacttagcaaaagatccaagagcattaattcaaataagaagtgaacaaacaggattattcgttcctgaaaattaa

SEQ ID NO: 1096 - protein, 380 aa, Leptotrichia buccalis  GRE type of compartment
MKFNVKKLIGLLVFLLMALVLSAANLDELRWVPKNREALSKLIDENKNKGNYVVFDWDYTSIYQDTQENLFRYQIDNLKFEMTPAAFSKAIRKDIPLDNFDKEYSNVKGQAINITKIANDLDKRYTFLYNNYIKDKKMSLKKIKATEEFKDFRGKLAFLYEAIGGSFSHDIAYPWVLYLFDNMTVEEVQKLAKEANDFGIGNKLGKYVLESSDKLTGEAGKVKYEYKSGLRTQPETANLFHEFEKNGIKVYIVASLEDIVKVFASDKSYGYNLSPDSVYGMRLEMNGNKYRAEYKHGYPQTQTKGKVEVINKYLKPKHGGKDPILVAGDSIGDANMLSEYKGTKILLLMKRKGKLDDLAKDPRALIQIRSEQTGLFVPEN

SEQ ID NO: 1097 - DNA, 471 bp, Leptotrichia buccalis  GRE type of compartment
atggatttaaaaaatttagacagagaaacattagaaaaaatacttagaaaagtagtacaagaagaactaaagaaaaaagttggaggatttgaaaaacatattgataaaagtggagttggggttgttaaaattcctactgtaaaaccagaaaaatttgatacaggaaatccaaatgacaaagtattcctaacagacgtattttcaattgaggaaagtggaagattaagctgtggagttatggaaatggaagaatctacatttgattgggaattgaactatgacgagatagactatgtaatagatggaacattagaaatcatagttgatggaaataaagttacaggaaatagaggagatgccattttaattcctaaaggttcaaaaataaaatttagtgctcctaactttgcaagatttttatatgtaatttatcctgcaaattgggaagaaactataaaaaaaatagtataa

SEQ ID NO: 1098 - protein, 156 aa, Leptotrichia buccalis  GRE type of compartment
MDLKNLDRETLEKILRKVVQEELKKKVGGFEKHIDKSGVGVVKIPTVKPEKFDTGNPNDKVFLTDVFSIEESGRLSCGVMEMEESTFDWELNYDEIDYVIDGTLEIIVDGNKVTGNRGDAILIPKGSKIKFSAPNFARFLYVIYPANWEETIKKIV

SEQ ID NO: 1099 - DNA, 1080 bp, Bacteroides capillosus ATCC 29799
atggagctttttgcgatcaggccggagatccggttcgggccggacgctctggcggccctggaggagctggcggggcggcgggtgctcattgtgacggatgaatttctcgcccgtaaatccgggctgctggagggggtgaaggagcggctgaagagctgcgagatcagcgtgttcgaccaggtgaagcccgacccgtcccttcgtctggtggcccagggggtccacgcccttcgggccttcgggccggacatagtgctggccttcggcggtgggtcccccatggactgcgccaaggccatgcgccactttgcgggagggaatccgcctccggagctgtggtgcatccccaccacagcgggcaccggctcggaggtcacatccttcgccgtcctcaccgacgcggacgcgggggtgaagtaccccctggtggacgatgccctgctgcccgactgcgcggtgctggacgcgtccctgcttgccggagtgcctccggcggtgacggcggacacaggcatggatgtgctcacccacgccgccgagggctgtgtggctcggaaagccaccccgttcagcgacgccatgggggagaaggctttttctatagcctggcgcagcctgagccatgcccacgccggggacaatgccgccaagggggagatgctgctggcctcctgcctggcgggcatctccttcaacgccgccggactgggcatctgccacgccctggcccacgccctgggcggccggtaccacatcccccacgggcggctcaacgccatgcttctgccccacgtcatcgccttcaacagcgctgacaagggggcggcggacaagtacgcccggctctccggactgtgcggcctggccaagaatccccgggcgctgataggcggcgtcaagcggctgcgggcaggactgggcatgccggagaagctcaccgcctgcggcgtggaggggcagaccctactggccgatctggacagcatcgcccaggccgctctggctgatgtgtgcgctccgggcaacccccgacccgctactcaggaagatttgaaggccatcctgaaggagctgatgtaa

SEQ ID NO: 1100 - protein, 359 aa, Bacteroides capillosus ATCC 29799
MELFAIRPEIRFGPDALAALEELAGRRVLIVTDEFLARKSGLLEGVKERLKSCEISVFDQVKPDPSLRLVAQGVHALRAFGPDIVLAFGGGSPMDCAKAMRHFAGGNPPPELWCIPTTAGTGSEVTSFAVLTDADAGVKYPLVDDALLPDCAVLDASLLAGVPPAVTADTGMDVLTHAAEGCVARKATPFSDAMGEKAFSIAWRSLSHAHAGDNAAKGEMLLASCLAGISFNAAGLGICHALAHALGGRYHIPHGRLNAMLLPHVIAFNSADKGAADKYARLSGLCGLAKNPRALIGGVKRLRAGLGMPEKLTACGVEGQTLLADLDSIAQAALADVCAPGNPRPATQEDLKAILKELM

SEQ ID NO: 1101 - DNA, 1473 bp, Bacteroides capillosus ATCC 29799
atggcacccgagcagctcctgtccgtgggcattgacatcggaacatccaccacccagctggtcatctcccgtctgactctggagaaccgtgcggggcccttctccgtaccccgcatcgccatcggggagaaggaggtgctctaccgcagcgccatccacttcacgccccttctctccgagacggcgattgacgccgaaggggtgcgggccattgtggcggaggagtaccgcaagtcgggcttccggcagtcggatatctccaccggcgcggtcatcatcaccggcgagaccgcccggaaggagaacgccaggcaggtgctggccgccctgtccgacttcgccggggactttgtggtggccaccgccgggcccgacctggaatccatcctggcggcccgtggggcggggatagatgaatactccaaggaacatcatgagaaaatattacactttgatatcggcggaggcacctccaacctggcactctacgaaaatggtgccctgacggccaccggctgtctggacgtgggcgggcggctcatcaagaacgagcgggggcgcatcacctacgtctccccggccctggagcggctgggggcggcggtgtcctccgtaccaattccaaaagcaggggaccgggcggaggcgtccagcctggaaccggtggtgtcggctctaacctgtgccctggagcaggcggcggggctgataccgccggacagtctgctggaagccctcatgacccgggacaccacctggacgccgccggagggcgtggacggggtttccttctccggcggggtggccgactgcatctggtcgccgccggaggacgcctttgcctacggggatatcggcgtcctgttgggcagagccatcgccgcatcttccgcctttcagcggacgggcatcgtcaggggcaccgagaccatccgggccaccgtggtgggggcgggcagtcactccacccaggtgtccggatccaccatcttctaccgcaatgtgtcctttccgctgaaaaacctgcccgtcctccggctgacggcggacgaggagggcagcggtgacgctctggccgctgccctgcgggacaaggcgggctggtttgccgaccaggggggtatgacccagattgccctcagcctgcggggtgaacccaacccggcctacggcagaatccaggacctggcccgtggcatcagggccggaatggagccgctgctagagcggggcatgttccctgtcatcgcggtggagggggacatggccaaggtgcttggccagaccctctggcccctgctgggaacggagggggccattctctgcctggacggcatcagcgccggcagcggggactatctggacatcggcgcaccggtggccggcggcgcggtgctgccggtggtggtaaagaccctggccttccagtcccagggcagcgaaaagcaaacacaagggggaaacagaccatga

SEQ ID NO: 1102 - protein, 490 aa, Bacteroides capillosus ATCC 29799
MAPEQLLSVGIDIGTSTTQLVISRLTLENRAGPFSVPRIAIGEKEVLYRSAIHFTPLLSETAIDAEGVRAIVAEEYRKSGFRQSDISTGAVIITGETARKENARQVLAALSDFAGDFVVATAGPDLESILAARGAGIDEYSKEHHEKILHFDIGGGTSNLALYENGALTATGCLDVGGRLIKNERGRITYVSPALERLGAAVSSVPIPKAGDRAEASSLEPVVSALTCALEQAAGLIPPDSLLEALMTRDTTWTPPEGVDGVSFSGGVADCIWSPPEDAFAYGDIGVLLGRAIAASSAFQRTGIVRGTETIRATVVGAGSHSTQVSGSTIFYRNVSFPLKNLPVLRLTADEEGSGDALAAALRDKAGWFADQGGMTQIALSLRGEPNPAYGRIQDLARGIRAGMEPLLERGMFPVIAVEGDMAKVLGQTLWPLLGTEGAILCLDGISAGSGDYLDIGAPVAGGAVLPVVVKTLAFQSQGSEKQTQGGNRP

SEQ ID NO: 1103 - DNA, 1365 bp, Bacteroides capillosus ATCC 29799
atgatactgaaaaccagcctgcacggccatgtgtatacattccaatcggtgaaggacgtgctggccaaggccaacgaggagaagtcgggtgaccggctggcgggcatcgccgccgagaatgccgaggagcgtgtggcggccaaggtggtgacggccaacctgctcctgtccgacctgcgggagaaccccgccgtgccctatgaggaggacgaggtcacccgcatcatccaggacgacatgaacgagaaaatttatagtgagatccgcaactggaccgtgtccgagctgcgggagtggctgctggacgagaaacacaccggcgcggacatccgccgcatctcccggggtctgaccgccgagatgatcgccgctgtgaccaagatcatgagcaatctggatctgatctacgcggccagaaagctgcgggtcaccgccacctgcaacaccaccatcggcgaggaaggcaccctgtcctgccgcctccagcccaaccaccccaccgacgatccggacggcatcatggcctccctgctggagggcctgaccttcggcgcgggagacgcggtgctgggcctcaacccggtggacgacagcgtggagagcgtgcggcgggtgctggaccggttccatgaaatccgcacccggtgggagatccccacccagatctgcgtcctggcccacgtgaccacccagatggacgcggtgaagcagggggcaccctgcgaccttatcttccagtccatcgccggcagccagaagggcaacgaggccttcggtctggacggcaagctcatcgaggaggccagacagctggtcctccgggagggcaccgccaccggacccaacgtgatgtactttgagaccggccagggctccgagctctcctccgaggcccaccacggcgccgaccaggtggtgatggaggcccggtgctacggctttgccaaacggttccagcccttcctggtgaacacggtggtgggcttcatcggccccgaatatctgtataattccaagcaagttatacgggctggattggaagaccactttatgggcaagctgaccggcgtgcccatgggctgcgatgcctgctacaccaaccacatgaaggccgaccagaacgacatcgaggacctggccgtcctcctcaccgccgccggatgcaactacttcatgggcattccccacggcgacgacgtgatgctcaactaccagaccaccggcttccacgagaccgccgccctgcgtgagctcttcggcctgaccgctatcaagcccttccaggactggctggagaagatgggctttgtgcgggacggaaaactgaccgagctggccggggacggctccgtgctgctggcgtga

SEQ ID NO: 1104 - protein, 454 aa, Bacteroides capillosus ATCC 29799
MILKTSLHGHVYTFQSVKDVLAKANEEKSGDRLAGIAAENAEERVAAKVVTANLLLSDLRENPAVPYEEDEVTRIIQDDMNEKIYSEIRNWTVSELREWLLDEKHTGADIRRISRGLTAEMIAAVTKIMSNLDLIYAARKLRVTATCNTTIGEEGTLSCRLQPNHPTDDPDGIMASLLEGLTFGAGDAVLGLNPVDDSVESVRRVLDRFHEIRTRWEIPTQICVLAHVTTQMDAVKQGAPCDLIFQSIAGSQKGNEAFGLDGKLIEEARQLVLREGTATGPNVMYFETGQGSELSSEAHHGADQVVMEARCYGFAKRFQPFLVNTVVGFIGPEYLYNSKQVIRAGLEDHFMGKLTGVPMGCDACYTNHMKADQNDIEDLAVLLTAAGCNYFMGIPHGDDVMLNYQTTGFHETAALRELFGLTAIKPFQDWLEKMGFVRDGKLTELAGDGSVLLA

SEQ ID NO: 1105 - DNA, 912 bp, Bacteroides capillosus ATCC 29799
atgaacgacaaggaattgcgcgccctcattgagcgcatgatcgccgaggtggccggacaggcccccacccctcaggtgaaggggagcgactaccaccccatggagccccagggcgtgacccgtccggcggcggggggcattgaccctgccgccgccatcccggatatcacccagaccgacctgcggcgtcagtatctggtaaaagagcccagaaacgggcgggcatttctggacctgaagcagaagacccccgcccgcatcggcctgggccgggcgggcgcccggtacaagaccgccaccatgctccgtttccgggctgaccacgcggcggctcaggactcctgcttctccatggtggacgaggcgtttgtgaagaagggcggctttgtgccggtacagactctgtgcaaggataaggacgagtacctgacccggcccgacaagggccgccggttcgacgaggccaatcaggccgtcatccgccagacgttaggacagaagccccgtgtggccctggtggtgggggacggcctcagctccgccgccatcgaggccaacgccctggattgcctggaggccatcaagggcggcctgaaggcctacgggctggagactggcccggcgctgttcgtcaagttctgccgggtgggtgcctccgaccacatcggtgacctgaccggcgcggaggtggtgtgcatgctggtgggggagcggcctggactggtgaccgctgagtccatgtccgcctatatcacctaccagccccatatcggcatccccgagtccaagcgcacggtggtctccaacatccaccggcagggaaccacagcggtggaggcaggcgcacacatcgccgaactgattcacaccatgctggagaagcgggcctccggcattgatttgaagctgtaa

SEQ ID NO: 1106 - protein, 303 aa, Bacteroides capillosus ATCC 29799
MNDKELRALIERMIAEVAGQAPTPQVKGSDYHPMEPQGVTRPAAGGIDPAAAIPDITQTDLRRQYLVKEPRNGRAFLDLKQKTPARIGLGRAGARYKTATMLRFRADHAAAQDSCFSMVDEAFVKKGGFVPVQTLCKDKDEYLTRPDKGRRFDEANQAVIRQTLGQKPRVALVVGDGLSSAAIEANALDCLEAIKGGLKAYGLETGPALFVKFCRVGASDHIGDLTGAEVVCMLVGERPGLVTAESMSAYITYQPHIGIPESKRTVVSNIHRQGTTAVEAGAHIAELIHTMLEKRASGIDLKL

SEQ ID NO: 1107 - DNA, 654 bp, Bacteroides capillosus ATCC 29799
atgattgatgagctgattcctgtcaaggtactggccacccacaccatcgccaatgtcagcgaggggctggccaaacggctttccctgcccgacggccaccgctccatcggcatcctcaccaccgactgcgacgacatgacctactgcgccctggacgaggccaccaaggccgccgccgtggaggtggtgtacggccggagtctgtacgcgggtgcgggcaacgcctccaccaagctggccggtgaggtcatcggtattctggccggacccaatccggcggaggtccagagcggtctgcgggcggcggtggccttcctccaggagggcggcggtttccgctccgccaacgaggacggctcggtggtctattttgcccacaccgtctcccgtacgggtacctacctgtcccagacggcgggggtggccgagggggaggcgctggcctatctcatcgccccgcccctggaggcgatggtggggctggacgaggcgctgaaggcggcggacgtggagctggtgacgctctatgagccgcccagcgagaccaatttcggcggcggtctgctcaccggtacccagagcgcctgcaacgccgcctgtgcggcctttgccgaggcggtaaaggcgattgcggcccggccccgggaaatttag

SEQ ID NO: 1108 - protein, 217 aa, Bacteroides capillosus ATCC 29799
MIDELIPVKVLATHTIANVSEGLAKRLSLPDGHRSIGILTTDCDDMTYCALDEATKAAAVEVVYGRSLYAGAGNASTKLAGEVIGILAGPNPAEVQSGLRAAVAFLQEGGGFRSANEDGSVVYFAHTVSRTGTYLSQTAGVAEGEALAYLIAPPLEAMVGLDEALKAADVELVTLYEPPSETNFGGGLLTGTQSACNAACAAFAEAVKAIAARPREI

SEQ ID NO: 1109 - DNA, 1464 bp, Bacteroides capillosus ATCC 29799
atgcagctggataaggatttacagtcggtccaggaggtccgggacctgattaagacggccaaggaggcccagcgggcacttgcccggatggaccaggcccagattgacaaaattgtggccgccatctcggcggcgggtgcggagcacgccgggcggctggccgccatggccgtggaggagaccggcttcggcaaaaaagaggacaaggagctgaaaaaccgcttcgccgccctcaccctctacgaggccattaaaaatcagcgcaccatcggcatcttggccgaggacaaggagaagcgcatcatcgatatcggcgtgcccgtgggcatcgtggccgggctggtgccctccaccaaccccacctccaccgtcatctacaaggccatgatctgcctcaaggcgggcagccccatcatcttctccccccaccccagcgccctgggctgtatccgggagacggtggcagtggtccgccgggcggcggagggggcgggggcgcccgtggggagcatctcctgtatctccacccccaccatggaggccaccagcgccctgatgaagcaccgggatacccggctcatcctggccaccggcggcggggctatggtcaaggcggcctattcctcgggcactccggccatcggtgtgggcgcgggcaacggaccggcctatatccaccgcaccgccgacgtgcctatggcggtgaagcggattctggactccaagacctttgacaacggcaccatctgcgccagtgagcagagcatcgtggttaccaaggagatggagagcgcggtgacggcggagctgacacgtcagggggcctgcatcctcagcgacggacagcacaaggctctctcaaagtgcattctccggcccaacggcaccatgaacccggccattgtgggcaagagcgtggagcaggtggcggctctggccggactgtccggcatcccggcgggcacccgggtgctggtggcccgtgagaccggcgtgggtcccggctacccctactccaacgagaagctggggctgattctggccctctatgtggaaagcgacgaggaggctgccctccgccggtgcgtggagattctggagtgggagggcgcgggccacaccttctccatccacgccgaggacgagaatgtggtcaagaagttcgccgccgctgtgccggccagccgggtgctggtgaatacgccctcctctctgggcggcatcggcgccagcacctgcctgttcccggccctcaccctgggctgcggcgcggtgggcggctcctccagctccaacaacatcggccccctggaccttatcaatatcaagcgggtggcctggggcgtcaaagagttggaggagctgcggggcggccctgcctgccgcacgggaaaccgtgggacggttgacgccgccgccatggacgagctggtgcgcctgatcatgaggaggctgaacgtatga

SEQ ID NO: 1110 - protein, 487 aa, Bacteroides capillosus ATCC 29799
MQLDKDLQSVQEVRDLIKTAKEAQRALARMDQAQIDKIVAAISAAGAEHAGRLAAMAVEETGFGKKEDKELKNRFAALTLYEAIKNQRTIGILAEDKEKRIIDIGVPVGIVAGLVPSTNPTSTVIYKAMICLKAGSPIIFSPHPSALGCIRETVAVVRRAAEGAGAPVGSISCISTPTMEATSALMKHRDTRLILATGGGAMVKAAYSSGTPAIGVGAGNGPAYIHRTADVPMAVKRILDSKTFDNGTICASEQSIVVTKEMESAVTAELTRQGACILSDGQHKALSKCILRPNGTMNPAIVGKSVEQVAALAGLSGIPAGTRVLVARETGVGPGYPYSNEKLGLILALYVESDEEAALRRCVEILEWEGAGHTFSIHAEDENVVKKFAAAVPASRVLVNTPSSLGGIGASTCLFPALTLGCGAVGGSSSSNNIGPLDLINIKRVAWGVKELEELRGGPACRTGNRGTVDAAAMDELVRLIMRRLNV

SEQ ID NO: 1111 - DNA, 696 bp, Bacteroides capillosus ATCC 29799
atgagtgaggtcaatgccgacggcgtgctgctcaaccctcaggagcacctcttgcaggaggtgcagaacctgaccaacagcctgatggcggccaagcccgccggagccgagggagaggaggccatggagcagcaggtgaccgctctcaacggcgaaccggccggaaccgtgggcggcgcgccccatatgcccgtcaaggctgtggaagaaatagaggaaaagaagccccgcagaaagcggggacgtgctgcccggacagaggaaaaggagacttcagtttccaccatgggccgggcagatgtggaaaaaacacccgagggacagaacatgccccagggtgggaatcatacaaaaggccccgtttccggggcgcacaacggaaaaggagacaggaaaatggctaacacaaatgcacttggtatggtggagacccgcggcctggtggccgccattgaggcggcggacgccatggtgaaggcggcaaacgtccagctggtgggcaaggagcaggtgggcggcggcctggtgaccgtgatggtccggggcgacgtgggggccgtcaaggcggccaccgacgccggcgccgcggcggcggagaaggtgggcgagctggtgagcgtccacgtcatcccccgcccccacgctgaggtggacttcgtcctgccccacggcaagggcgagtacgacgggcagtaa

SEQ ID NO: 1112 - protein, 231 aa, Bacteroides capillosus ATCC 29799
MSEVNADGVLLNPQEHLLQEVQNLTNSLMAAKPAGAEGEEAMEQQVTALNGEPAGTVGGAPHMPVKAVEEIEEKKPRRKRGRAARTEEKETSVSTMGRADVEKTPEGQNMPQGGNHTKGPVSGAHNGKGDRKMANTNALGMVETRGLVAAIEAADAMVKAANVQLVGKEQVGGGLVTVMVRGDVGAVKAATDAGAAAAEKVGELVSVHVIPRPHAEVDFVLPHGKGEYDGQ

SEQ ID NO: 1113 - DNA, 735 bp, Bacteroides capillosus ATCC 29799
gtggcgctgctgaccgaggaggacgtgcgccgcatgtccggcggcggcacccggggtccggtggtggtccgggcgggggaggttctcacccctgccgcccgggactggctgagagagaagggggtggaggtggtctatccccaggggcagaccgagggcggcgagcggccctcggcccggtaccgcaccatatccggggcggtgctgtcggagaagccggagcacatgacccacctgaagggcaatatcctggtggacaaggaccatccccgcatcgccttccggggctgcatcgacagcctggaggcggagattctcttagctcagcagacctgcgccggggcggggtatcccaccctggcacaggagctggaggaggtgctggcctttgtgcggcggttcatccgcttcgacgtgctggacgagccggtgggggagattgagctgtgcgggtatggcccggcagagctgcgggagtactcccactacccggagaagcacctgggccagccccacttcatgccccactacaccgactctcccgccattctggcggtgaacaaggtgcgcaccgtggtgcggcgcaccgagctggcggcctatgccgccttccgggacgccgacggcggtgtgaagcggccggacatgattctggggctcaaccgcctgtcctccctgatgtggatcatgatgatcaagctcaaggcggggaaatacccccgggaggtgaagtaa

SEQ ID NO: 1114 - protein, 244 aa, Bacteroides capillosus ATCC 29799
MALLTEEDVRRMSGGGTRGPVVVRAGEVLTPAARDWLREKGVEVVYPQGQTEGGERPSARYRTISGAVLSEKPEHMTHLKGNILVDKDHPRIAFRGCIDSLEAEILLAQQTCAGAGYPTLAQELEEVLAFVRRFIRFDVLDEPVGEIELCGYGPAELREYSHYPEKHLGQPHFMPHYTDSPAILAVNKVRTVVRRTELAAYAAFRDADGGVKRPDMILGLNRLSSLMWIMMIKLKAGKYPREVK

SEQ ID NO: 1115 - DNA, 630 bp, Bacteroides capillosus ATCC 29799
atggaacacacagcgctggaacggctggcggaggcggtggtggagcggctgaccgtgcctctggaggccagcgggcggcatgtccacctgtgccgggctcatgtggaggccctgttcggaccgggccaccagctggagaaggtgcgggatctgtcccagccggggcagtttgtctgtgccgagcgggtgacccttgtgggccccaagggccagctgggcaacgtggtggtgctgggccccgagcggcctgagagccaggtggaggtctccctcaccgacggagtatccctgggtattgcgccgccggtgcgcatctcgggggacatagccggaacgccgggtattgtcctccggggaccggcgggtgagatcaccctgaagcagggggtcatcgccgccaagcggcacatccacatgaccccggaggacgccagacggtggggcctgtccgacaaacaggatatccggctgcgcaccctcaccagccgtccggttacctttgaggcggtggaggtgcgcatttcccccaaattctccacagccgttcacctggactacgacgaggccaacgcctgcggcttccgcaagggggaccgggccatccccgtgacagggggagagggcctgtga

SEQ ID NO: 1116 - protein, 209 aa, Bacteroides capillosus ATCC 29799
MEHTALERLAEAVVERLTVPLEASGRHVHLCRAHVEALFGPGHQLEKVRDLSQPGQFVCAERVTLVGPKGQLGNVVVLGPERPESQVEVSLTDGVSLGIAPPVRISGDIAGTPGIVLRGPAGEITLKQGVIAAKRHIHMTPEDARRWGLSDKQDIRLRTLTSRPVTFEAVEVRISPKFSTAVHLDYDEANACGFRKGDRAIPVTGGEGL

SEQ ID NO: 1117 - DNA, 234 bp, Bacteroides capillosus ATCC 29799
gtgctgctgggtacggtagagggtaatatctggtccaccaagaagtcccccggcctcttcggtaagtcctttctcaccgtccgggtggggggagagctcctcatctgcgccgactgcgtgggcgcgggggagggagaacgggtgctggtggccacaggcggcgcggcccgtgtggccgccgggaaggacgtcccggtggacgctgccgtggtgggcatcgtggaccagacctag

SEQ ID NO: 1118 - protein, 77 aa, Bacteroides capillosus ATCC 29799
MLLGTVEGNIWSTKKSPGLFGKSFLTVRVGGELLICADCVGAGEGERVLVATGGAARVAAGKDVPVDAAVVGIVDQT

SEQ ID NO: 1119 - DNA, 1092 bp, Bacteroides capillosus ATCC 29799
atgaatttgtccatcaacgagattatcatctatctaatggtcctcttcatggtcctgggcgcggtggaccggattctgggcaaccgcttcggcctgggggagaagtttgaagagggtatcatgaatatgggcgccctggcgctgtccatgatcggcatcatctgcttggcgccggttctggccgatgtactgcggccggtggtggtgccggtgtaccagttcctgggggcagacccggccatgttcgtgggcaccattctggccaacgacatgggcggcgcgcccctggccaaggagctggcgctgacggaagaggcggggcagtttggcggcctcatcgtgggcgccatgctggggcccaccattgtgttcaccattcctgtgggcctgggcatcatccaaaaggaggaccggccggctctggcctccggcgtgctggcgggcgtggtcaccatccctcttggctccctggtgggcggcctggtggccgggtttagcatcggcatggtgctgcgcaacctgatccccatcgtgctcatcgccgtgctcatcgccatcggcctgtggaagattccaaacggcatggtgaagggctttcaggtgttcggcagggcggtggtggtcatcatcaccgtgggcctggccatcgccattgtccagaagctgacccccatcaccattctgcccggcctcacccccattgaggagggcttcaccgtagtgggcgacatcgccgtggtgctggcgggagcgttcccgctggtgtacgtcatcaccaaggtgttccgcaagcccctgatgaagctgggccacctgctgggcatgaacgacatcgccgccgccggaatggtggccaccctggccaacaacatccccatgttcggcatgatgaaggacatggatcaccggggcaaggtcatcaacgtggcctttgctgtgtcggcggcctttgtgttcggcgaccacctgggctttaccgcaggctttgactcgtccatgattttccccatgattgtgggcaagctggtgggcggtgtgtccgccgtggcggtggccatgctgctgaccagaaaggaggcaagccgtggataa

SEQ ID NO: 1120 - protein, 363 aa, Bacteroides capillosus ATCC 29799
MNLSINEIIIYLMVLFMVLGAVDRILGNRFGLGEKFEEGIMNMGALALSMIGIICLAPVLADVLRPVVVPVYQFLGADPAMFVGTILANDMGGAPLAKELALTEEAGQFGGLIVGAMLGPTIVFTIPVGLGIIQKEDRPALASGVLAGVVTIPLGSLVGGLVAGFSIGMVLRNLIPIVLIAVLIAIGLWKIPNGMVKGFQVFGRAVVVIITVGLAIAIVQKLTPITILPGLTPIEEGFTVVGDIAVVLAGAFPLVYVITKVFRKPLMKLGHLLGMNDIAAAGMVATLANNIPMFGMMKDMDHRGKVINVAFAVSAAFVFGDHLGFTAGFDSSMIFPMIVGKLVGGVSAVAVAMLLTRKEASRG

SEQ ID NO: 1121 - DNA, 429 bp, Bacteroides capillosus ATCC 29799
gtggataagcaggcactggaggccctggtgcgccaggtgctgctggagaagctgggggaagtccccggggagatggtaaaaaaggttccggtgccccagctgaaggtgacggaggagcaccggatggacaccggccggacgggtgacagggtctacacccgggacctgttcgcccttgacgagagtccccggctgggtgcgggcatcatggagatgaccgacaccaccttcccctggacgctgaactacgacgagatggactatgtgattgagggacggctggacatccagaccgaccggggtaccgtatccgccggacctggtgagatcatctatatcccaaagggaagctccatccggttctcggtgacggggcacgcccggttcctctatttcgtctatccggcggactggcagagccagaaatga

SEQ ID NO: 1122 - protein, 142 aa, Bacteroides capillosus ATCC 29799
MDKQALEALVRQVLLEKLGEVPGEMVKKVPVPQLKVTEEHRMDTGRTGDRVYTRDLFALDESPRLGAGIMEMTDTTFPWTLNYDEMDYVIEGRLDIQTDRGTVSAGPGEIIYIPKGSSIRFSVTGHARFLYFVYPADWQSQK

SEQ ID NO: 1123 - DNA, 150 bp, Bacteroides capillosus ATCC 29799
ttgggcagcgaaaccagcggaggggggaagcctccgcatgtcagcgcacctgctttgacgaggtcattatgtcagccggagaagaaaatgtcaattcctttttcgggcatgatgtataaaaagcttgacagaaaagaaacaaagggctaa

SEQ ID NO: 1124 - protein, 49 aa, Bacteroides capillosus ATCC 29799
MGSETSGGGKPPHVSAPALTRSLCQPEKKMSIPFSGMMYKKLDRKETKG

SEQ ID NO: 1125 - DNA, 1134 bp, Bacteroides capillosus ATCC 29799
atggaagttttcagcgtcaaaaccaagatcctgaccggcagcgggctggaagatctggcccctcagatcaagcgcggttttgtggtcacggaccgttttatggcggagagcggccgtatcagctacgtaaccgatactctggataaggcgggcgccgaatggaagctgttcagcgacgttcaggccgaccccgatgttgccaccgtgaccaagggggtgggcatcatccaggagttcaagcccgacagcgtcatcgcctttggcggcggctccgccatcgacgcggccaaggccatcgtgtatttcgccaacaagacccagaatgtgggcgagtgcaagttcatcgccatccccaccaccagcggcaccggctctgaggtgacccgtttcgccgtcatcaccaaccgtgagaagggcgtcaagtatcccctcatcgacgacagcctgctgcccgatgtggccattctggacccccagctcaccgtcagtgtgccccccgccatcaccgccgacaccggtctggacgtgttcacccacgcggtggaggcctttgtgtgcaccgctgccaacgactttaccgacgcagctgctgagaaatccatcaagctggtgcgccgccacctgctcaacgcctatcagcaccccgatgacctggaggcccgtcagggcatgcacaacgcctcctgtctggccggtatcgccttctccaacgccggtctgggtctgaaccacggcatggctcacgccctgggcgcccggttccacatcccccacggacgtgccaacggcatcctcctgccctacgtgatgagcttcaacgccggctgcgtggacaagctgacgcctaccgccaagcggtatgcccagatctcccgtctgctgggtctggagagcagcagcgtccgccagagcgccctcaacctgatccggaccgcccgccagtacatcgagaagctgagcgtgccctccaccattcaggctgccggcgtgaatgccgccgacttcgaggccgcccttgaggagatggcccaggccgccgtggccgaccgctgcaccgccaccaacccccgttcctgcaccgtggaagaggtcatgcacctctatcacaaggcgttcatcggcaagctgccctga

SEQ ID NO: 1126 - protein, 377 aa, Bacteroides capillosus ATCC 29799
MEVFSVKTKILTGSGLEDLAPQIKRGFVVTDRFMAESGRISYVTDTLDKAGAEWKLFSDVQADPDVATVTKGVGIIQEFKPDSVIAFGGGSAIDAAKAIVYFANKTQNVGECKFIAIPTTSGTGSEVTRFAVITNREKGVKYPLIDDSLLPDVAILDPQLTVSVPPAITADTGLDVFTHAVEAFVCTAANDFTDAAAEKSIKLVRRHLLNAYQHPDDLEARQGMHNASCLAGIAFSNAGLGLNHGMAHALGARFHIPHGRANGILLPYVMSFNAGCVDKLTPTAKRYAQISRLLGLESSSVRQSALNLIRTARQYIEKLSVPSTIQAAGVNAADFEAALEEMAQAAVADRCTATNPRSCTVEEVMHLYHKAFIGKLP

SEQ ID NO: 1127 - DNA, 108 bp, Bacteroides capillosus ATCC 29799
atgagttcccagagcggtgcagctcctaaaatttcgagaatgacggattaccggttcaagaaattctgggggatttttttgcgcttttatctggaacttttacgctga

SEQ ID NO: 1128 - protein, 35 aa, Bacteroides capillosus ATCC 29799
MSSQSGAAPKISRMTDYRFKKFWGIFLRFYLELLR

SEQ ID NO: 1129 - DNA, 390 bp, Bacteroides capillosus ATCC 29799
atgaagatcaaggcctcaggcagtaaggagggtgttttgttggtagagctggatgaaaaacagcgcatcatacaggaatttgtacctggcaaacaggttacgctggcccatgtaatcgccaacccggtggacgacctctatgccaagctgggtctgattgacgccggcggagccatcggaattctgactattacgcccagcgaggcagccatgattgccgccgacgtcgccaccaaagccgcggatgtgaagattggatttgtggaccgctttaacggttctctggtcatcacaggagatgtggcggcggttcaggcggctctgacggatgttatgagcacgctgtgcggtatgatgggctttgcttccgcgcccatcaccaaaacataa

SEQ ID NO: 1130 - protein, 129 aa, Bacteroides capillosus ATCC 29799
MKIKASGSKEGVLLVELDEKQRIIQEFVPGKQVTLAHVIANPVDDLYAKLGLIDAGGAIGILTITPSEAAMIAADVATKAADVKIGFVDRFNGSLVITGDVAAVQAALTDVMSTLCGMMGFASAPITKT

SEQ ID NO: 1131 - DNA, 450 bp, Bacteroides capillosus ATCC 29799
atgaacgaaaaacggagtccccgtattatcctcatcggccggtccacggcgggcaagaccacgctgtgccagcggatcgccaaggaggatcttaactatcataagacacagaccgtacagatacggaacgaaacaatgatcgatactccgggcgaatacctggagcggcgctattttcggggggccttgatggtcaccgccgctgacgcggatattatcgtgctggtccaggacgccactgagcctggcagtatgtttccccccgcctatagcagtacatttgcaaagccctgtgtcggcgttatcacgaaagcggatctggccacgcaggagcagcttgtgcgggcggaaaaatatctgaacaatgccggcgctgaagagatctatacagtcagcagcgtgaccggcgagggagtggatgatctggttcggcggttgggcttccaataa

SEQ ID NO: 1132 - protein, 149 aa, Bacteroides capillosus ATCC 29799
MNEKRSPRIILIGRSTAGKTTLCQRIAKEDLNYHKTQTVQIRNETMIDTPGEYLERRYFRGALMVTAADADIIVLVQDATEPGSMFPPAYSSTFAKPCVGVITKADLATQEQLVRAEKYLNNAGAEEIYTVSSVTGEGVDDLVRRLGFQ

SEQ ID NO: 1133 - DNA, 585 bp, Bacteroides capillosus ATCC 29799
atgggaaaagatggaatttccgttgtcatcgcggacgacgagccgatcagcagaatggacctgaaggagctgctgaccgagggcggctatacggtgctctcggaggtctcggacggatttgacgcggtggaacaatgcaagctgtatcacccggatttggtgattctggatatcaagatgccgtttttggacggcatctcggctgcaaagatcatatatgaggaagacctggccgacaccatcatcatgctcacggcgtacagcgagcgggagttcattgaccaggccaagggctgtggcgtcagtggatacctggtcaaacccatcgacgagaaatctctggttcccagcatcgagctggcagtagcccgcagtcaggagctcaagcggctgcgcaaggacatggaaaaggtgtccgagcggttgaaaagccggagcgtgatcgagaaggccaagggcatcatcatgcaggagcagggcatgacggagcaggaggcgtatgactacatacgaaaactcagcttggacaagcatctctccatgcgccgggtagcggagatcatactggtgaaaaacggcgggtga

SEQ ID NO: 1134 - protein, 194 aa, Bacteroides capillosus ATCC 29799
MGKDGISVVIADDEPISRMDLKELLTEGGYTVLSEVSDGFDAVEQCKLYHPDLVILDIKMPFLDGISAAKIIYEEDLADTIIMLTAYSEREFIDQAKGCGVSGYLVKPIDEKSLVPSIELAVARSQELKRLRKDMEKVSERLKSRSVIEKAKGIIMQEQGMTEQEAYDYIRKLSLDKHLSMRRVAEIILVKNGG

SEQ ID NO: 1135 - DNA, 1425 bp, Bacteroides capillosus ATCC 29799
gtggataccatttggacactgtgcaggaagtatacggacctctccgatgaggagatccggatcatagagaacacctccgccattttgcagccgctggccaatctggaggacgcggacatcttcatcgactgtccccagcgggacggcgacgccattgtggtggcggaggccaagccggaggatgtgccctcttcctacaagaattcggtggtggggctgctggcaaaggcggagaacgagcccgctgtggcccggacgttccgcttgggtgtggggaccaaacagatgaaggccaccacccaggaaaacggcagcacaatccaatcggtggagcccatccggcacggttcccggatcatcggtgtacttatccgggaaaagcgtgtggatgagcagcatctggtcagtgaacggatccatttttcccagaaaagctatgaaaacatcgccaatgtgctgacccggatggtttcggagaacaattggctgacggaatgtatcgacgaggcgctggtcatggtggaccgcagcggggtcgtcaccttctgcaactccctggcccgggagctctatcagaacctgggctatgtggaggatctgctgggccagacctatgagaacatccggctgattgaccaggaggagccgccggaagaggtttcgggctactccttcgtagagaccaccgtgggccggcatgtgctgaacatcaagcgggtccagctcaacgcgcccggcatggccttcgcccttatcatacgggacgagacctggcgccgggagcaggagaaggccctgattctcaagtcggtggccatcaaggaaatccaccatcgggtgaagaacaacctgcagaccatcgccagtctgctgcggctgcagatgcgccgcacggacagcgaggagacccgtcaggtgctgggagagagcatgaaccgcatcctctccattgccagtacccacgagctgctcgcccagagcggtgtggatgaggtgatgatcggcgaggtcattaccaatatcaaaaacaataccatgcggtatttctccaatccgaactgcctggtgaccatcaccctggagggcgatgatttcaaggtggattcggatgtggccacctcggtggccattatcatcaacgaactgctccaaaactcgctgaaatatgcgtttacggggcgggatacaggcctgattaccattacagtcaagaaaggtcagctctactccagcattcaggtcagcgacaatggcagcggatttgacgtccacagtacggaacgtaaccgtctgggcctgtccattgtgcagacgctggtcaaggacaagctgcggggtacgctgaccatcgagtcggggacctggggcacctgcgcctccttcgattttaaaaaccaaacaattgaggcggacgtggtgacgtaa

SEQ ID NO: 1136 - protein, 474 aa, Bacteroides capillosus ATCC 29799
MDTIWTLCRKYTDLSDEEIRIIENTSAILQPLANLEDADIFIDCPQRDGDAIVVAEAKPEDVPSSYKNSVVGLLAKAENEPAVARTFRLGVGTKQMKATTQENGSTIQSVEPIRHGSRIIGVLIREKRVDEQHLVSERIHFSQKSYENIANVLTRMVSENNWLTECIDEALVMVDRSGVVTFCNSLARELYQNLGYVEDLLGQTYENIRLIDQEEPPEEVSGYSFVETTVGRHVLNIKRVQLNAPGMAFALIIRDETWRREQEKALILKSVAIKEIHHRVKNNLQTIASLLRLQMRRTDSEETRQVLGESMNRILSIASTHELLAQSGVDEVMIGEVITNIKNNTMRYFSNPNCLVTITLEGDDFKVDSDVATSVAIIINELLQNSLKYAFTGRDTGLITITVKKGQLYSSIQVSDNGSGFDVHSTERNRLGLSIVQTLVKDKLRGTLTIESGTWGTCASFDFKNQTIEADVVT

SEQ ID NO: 1137 - DNA, 1440 bp, Bacteroides capillosus ATCC 29799
gtgaaactcttgcatgaagttattctcagcgtaggcatcgacatcggcacctccaccacgcagttgattttcagccgtctgaccattgagaaccaggccagcagctacaccgtgccccggatcaacatcgtggacaaggaagtgatttaccgcagtcggatttactttacgcccctgcgctcaccgaccgaaattgacgccgaggcggtaaagaagatcgtgcgcagcgagtaccgggccgcgggcatcacgccggaggagctgaagaccggcgcggtcatcatcaccggtgagaccgcccggaaggaaaacgccaacgaggtgctctccgccctgtccgacctggcgggagactttgtggtggccactgccggccccgacctggagtcggtgctgtccggccggggcgcaggagccgacgtactgtccaaggagaagcacaccacggtggccaacctggacatcggcggcggcacgacaaacatcgccctttacgaaaggggcaccctgaggggcacctgctgcctggatgtgggcggacgcctcatcaaggtggcagacggtcgcatctcctacatctaccccaagatccaggcccttgccaaggacaacggcattgagatcaaggtgggcgaccgggcctatcccgagcagctgtacggcgtgtgccgcctgatggcggcgcagctggcccaggcgctgcatctcgcggcgccggacgggcatcacgccggtatgtatacaaacgacggcagggcgctgcctccccagccccagattcaggcagtgacctattcaggcggcgtggccgactgcatctatcagaagatggaggacgacgtcttccgcttcggtgatgtgggcgtgctgctgggcaaggccgtccgggccgatcccgacctgaaccgggtggagctgtgccaggcggcagagaccatccgggccacggtggtgggcgcgggaacccacaccaccgaagtcagcggcagcaccatccgctatgagcgggacaagctgcccatcaaaaatgttcccattcttaaggtatcgcaggaggatgaggagtcgctggagacgctgaaatcctctatcatacagcagatgcctctgttcgcacctgaggggaaggtggaacagattgccattgcctttaccggagaaaagcgcaccagctttgcagatgttcaggcattggcggcagcggtaatagaaagcgctaaggaggtgatccaaggtccctatcccttgatcgtggtggtggagaacgatatcggcaaggtgctgggcaacgccctcaacgtgctcctggagcacaagaaggacgtcatctgcatcgacggaatcaagaccctgagcggcgattacatcgatatcggcgaacccatcgcgggcggacaggtattacccgtcgtcatcaagactttgatcttcaattcctaa

SEQ ID NO: 1138 - protein, 479 aa, Bacteroides capillosus ATCC 29799
MKLLHEVILSVGIDIGTSTTQLIFSRLTIENQASSYTVPRINIVDKEVIYRSRIYFTPLRSPTEIDAEAVKKIVRSEYRAAGITPEELKTGAVIITGETARKENANEVLSALSDLAGDFVVATAGPDLESVLSGRGAGADVLSKEKHTTVANLDIGGGTTNIALYERGTLRGTCCLDVGGRLIKVADGRISYIYPKIQALAKDNGIEIKVGDRAYPEQLYGVCRLMAAQLAQALHLAAPDGHHAGMYTNDGRALPPQPQIQAVTYSGGVADCIYQKMEDDVFRFGDVGVLLGKAVRADPDLNRVELCQAAETIRATVVGAGTHTTEVSGSTIRYERDKLPIKNVPILKVSQEDEESLETLKSSIIQQMPLFAPEGKVEQIAIAFTGEKRTSFADVQALAAAVIESAKEVIQGPYPLIVVVENDIGKVLGNALNVLLEHKKDVICIDGIKTLSGDYIDIGEPIAGGQVLPVVIKTLIFNS

SEQ ID NO: 1139 - DNA, 1371 bp, Bacteroides capillosus ATCC 29799
atgatcttaaagacaaagctgtttggccacgtctacgagttcaagtccattcgagaggtcatggccaaggcaaacgaggaaaagtccggcgataagctggccggcattgctgcggagaccgccgaagagcgggtcgctgccaaggtagtgctctcccatctgaccctgaatgacctgcgtaactgccccgccgtcccctatgaggaggacgaggtcacccggatcatccaggactctgtcaatgagaccattttcaacgagttcaagaacatgacggttgccgagttccgtgagtggctgctggacacccagaccactcccgacatgatccgccgggcctcccgcggcctgacttctgagatcgtggccggcgtctgtaagctgatgagcaacctggacctcatctacgctgccaagaagatgcgcgtgaccgcccactgcaacaccaccatcggtctgcccggcaccttctcttcccgtctgcagcccaaccacaccaccgatgatcccaagggcatcattgcttccgttatggaaggtctgtccctgggctgcggcgacgccgtcatcggcctgaaccccgtggacgactccgtggagagcgttgcccgcatcctgaagatgttcgacgagttcaagcataagtgggagatccccacccagatctgcgtgctggcccacgtgaccacccagaccgaggccgccaacaagttcggcgctcctctggacctgatgttccagtccatcgccggctcccagaagggcaacgaggctttcggcctgaacgccgccatgctggacgagggccacgccaccatgctgtcccgcggcacctgcaccggccccaacgtcatgtacttcgagaccggccagggctccgagctgtcctctgaggcccacaacggctgggaccaggtcaccatggaggcccgctgctatggcttcgccaagcgctatcagcccttcctggtcaacaccgtcgtcggcttcatcggccccgagtacctgtacgattccaagcaggtcacccgcgccggcctggaggatcacttcatgggcaagctgaccggcatccccatgggctgcgacgcctgctacaccaaccacatgaaggccgaccagaacgacatcgagaacctggccaccctgctggttgccgccggctgcaactacatcatgggcgtgcccgaaggcgacgactgcatgctgatgtatcagtgcaccggctatcatgaggccgccgccctgcgtgaggtctttggcctgcgtcccatccacgagttcgatatgtggctggagaagatgggcttctccgagaacggcaagctgacccccaaggcgggcgacgcttctgtgttcctgcgtaaatga

SEQ ID NO: 1140 - protein, 456 aa, Bacteroides capillosus ATCC 29799
MILKTKLFGHVYEFKSIREVMAKANEEKSGDKLAGIAAETAEERVAAKVVLSHLTLNDLRNCPAVPYEEDEVTRIIQDSVNETIFNEFKNMTVAEFREWLLDTQTTPDMIRRASRGLTSEIVAGVCKLMSNLDLIYAAKKMRVTAHCNTTIGLPGTFSSRLQPNHTTDDPKGIIASVMEGLSLGCGDAVIGLNPVDDSVESVARILKMFDEFKHKWEIPTQICVLAHVTTQTEAANKFGAPLDLMFQSIAGSQKGNEAFGLNAAMLDEGHATMLSRGTCTGPNVMYFETGQGSELSSEAHNGWDQVTMEARCYGFAKRYQPFLVNTVVGFIGPEYLYDSKQVTRAGLEDHFMGKLTGIPMGCDACYTNHMKADQNDIENLATLLVAAGCNYIMGVPEGDDCMLMYQCTGYHEAAALREVFGLRPIHEFDMWLEKMGFSENGKLTPKAGDASVFLRK

SEQ ID NO: 1141 - DNA, 912 bp, Bacteroides capillosus ATCC 29799
atgagggaggtgcacgctatgaatgagaaggatttaagaagtatcatcgagcaggtactggctgagatgaacggcgccggcgaggccaaggaggctgcgccctcctgctgcaccgccgcccctgttgaggagagctgcaaggtggaagagggctgcctgcccgacatcaccgagatcgacatccgtgagcagtatctggtgaaggaccccgagaacggcgaggagtacgctgagctgaagatgaacgctccctgccgcctgggcatcggcaaggccggcgcccgctacaacaccctgcctcagctggagttccgtgccgcccactccgccgcccaggacgccgtgttcaacgacgtggacgccgagttcgtggagaagatgggcctgtggaccgtgcagacccagtgcgacagcaaggatacctacctgacccgccccgacctgggccgcaagctgagccccgaggccgttgagaccatcaaggccaagtgcaagaagaaccccaccgtgcagatctacgtggcggacggcctgtcctccgccgccgtggccgccaacatcggcgacctgctgcccgccctgatgcagggcctgcagagctacaagatcgacgtgggcactcccttcttcgtcaagtacggccgcgtgggcgtcatggatgagatctccgagctcaccggcgccgaggtcacctgcaccctgatcggcgagcgtcccggcctgatcaccgccgagtccatgtccgcctacatcgcctacaaggctaccgtgggtatgcctgaggcccgccgtaccgtggtgtccaacatccaccgcgccggtaccatccccgccgaggccggtgcccatatcgccgagatcatcaagatcatgcttgagaagaaggccagcggcaccgatctgaaactttaa

SEQ ID NO: 1142 - protein, 303 aa, Bacteroides capillosus ATCC 29799
MREVHAMNEKDLRSIIEQVLAEMNGAGEAKEAAPSCCTAAPVEESCKVEEGCLPDITEIDIREQYLVKDPENGEEYAELKMNAPCRLGIGKAGARYNTLPQLEFRAAHSAAQDAVFNDVDAEFVEKMGLWTVQTQCDSKDTYLTRPDLGRKLSPEAVETIKAKCKKNPTVQIYVADGLSSAAVAANIGDLLPALMQGLQSYKIDVGTPFFVKYGRVGVMDEISELTGAEVTCTLIGERPGLITAESMSAYIAYKATVGMPEARRTVVSNIHRAGTIPAEAGAHIAEIIKIMLEKKASGTDLKL

SEQ ID NO: 1143 - DNA, 621 bp, Bacteroides capillosus ATCC 29799
atggcgactcgtctgatccccaatgtgtcccccgacatggcgaaggaactgaaccttcagcctcacgagaagtccctggccatcatcaccgccgactgcgatgatgtgacctataccgctctggacgaggccaccaagaaggctgactgccgcgtggcctatgccaagagtttctacgccggtgctgccaatgccaacaccgctctggccggtgaggttatcggcatcctggccgctcccaatcccgctgaagcccgtgccggcctggaggcctgcgtggacgtgattgagaacgtggcccacttcatctccgccaacgacgatgacagcgtgtgctactacgcccactgcatctcccgtaccggctcctacctgtccgagggcgccggcatcaacgagggcgaggctctggcctacctgatcgctcctcctctggaggctatgtacggcgtggatgccgctctgaaggccgctgacgtgcgcatgtgcgtgctgtacgctcctccttctgagaccaacttcggcggcgctctgctcaccggcagccagtccgcctgcaagtccgcctgcgacgccttcgccgccgccgtggagtccgttgccgatcagcccaagatctga

SEQ ID NO: 1144 - protein, 206 aa, Bacteroides capillosus ATCC 29799
MATRLIPNVSPDMAKELNLQPHEKSLAIITADCDDVTYTALDEATKKADCRVAYAKSFYAGAANANTALAGEVIGILAAPNPAEARAGLEACVDVIENVAHFISANDDDSVCYYAHCISRTGSYLSEGAGINEGEALAYLIAPPLEAMYGVDAALKAADVRMCVLYAPPSETNFGGALLTGSQSACKSACDAFAAAVESVADQPKI

SEQ ID NO: 1145 - DNA, 603 bp, Bacteroides capillosus ATCC 29799
atgaaggcattgggtatgatcgagacccggggactggtggccgccattgaagcggcggacgccatggtcaaggccgccaacgtggacctgcagtgcaaggagcatgtaggcggcggtctggtcaccgttatggtccggggcgatgttggcgccgtcaaggccgccaccgatgccggtgctgccgcagcggaacgggtgggagaactcctctccgtccatgtgatcccccgcccccatcaggaggtggaggggatcctgggcgagccggatcccacacccgtaccgcctgtggagccccagcccgacccggaacctgtttcccagcctgaacctgtcgctgagcccgaacccgctcccgcgcccgagacggagcctgtgcccgccgccgagccggagcaggaagccgaggctgagcccgttcaggaagagggcgagcctgtccagttctccgctgaggagctggagcatctctccgtggtcaagctgcgtgccgctgcccgccagatgggcctgaccagcatgaccaagaaggagatcagattcgccaaacgggaagagctgctgacggcgatccgtgcctttatggacggcggatccaactga

SEQ ID NO: 1146 - protein, 200 aa, Bacteroides capillosus ATCC 29799
MKALGMIETRGLVAAIEAADAMVKAANVDLQCKEHVGGGLVTVMVRGDVGAVKAATDAGAAAAERVGELLSVHVIPRPHQEVEGILGEPDPTPVPPVEPQPDPEPVSQPEPVAEPEPAPAPETEPVPAAEPEQEAEAEPVQEEGEPVQFSAEELEHLSVVKLRAAARQMGLTSMTKKEIRFAKREELLTAIRAFMDGGSN

SEQ ID NO: 1147 - DNA, 1482 bp, Bacteroides capillosus ATCC 29799
atgcagctgattgataaagatcttctgtccatgcaggaggtccgtgagctggtggaagcggctaaggtagcccagcgcgagctggctgccatgaaccaggagcaggtcgaccgtattgtccgggccattgctgaggcaggcgtgcgcaacgcccgccgtctggcccagatggcccacgaggataccggcttcggtatcgtggacgacaaggtcgtcaagaacgtattcgccagccagggtgtgtatgagcacatcaagaatatgaagaccatcggagagctcagccgggacgactccaagggcatccgcaccatcgcggtgcccgtgggcgtcatcgctggtctgatcccctccaccaaccccacctctaccgcactgtacaagtcggagatcgccatcaagtcgggcaacgccatcgtgttctccccccaccccacggctctgcgctgcatcctggagaccgtcaaggtcatccggcaggccatcgccgaggcgggcggcaatgagaacctggtgtcctgcattaccatccccaccatggaggccaccgacaacctgatgcgccaccgcgatgtggccatgattctggccaccggcggttccgccatggtgcgtgcggcctactcctccggcacccccgccatcggcgtgggcccgggcaacggccccgcctatctggagaagagctgcgacctgcctctggcagtcaagcgcattctggactccaagaccttcgacaacggcaccatctgcgccagcgagcagtccatcatctgcgatgaggacatggtgcccgccgtgcgggccgagatggagaagcagggcgcctacttcctggacgacgaggagcgggagaagctaggcaagttcatcctgcgtgccaacggcaccatgaacccccagatcgtgggccgcagcgtggccaccatcgccagcctggccggcctggacaaggtgcctcccacggcccgtgtcctggtggcccgtgagaccggcgtgggtcgcggccatccctactccaacgagaagctgggtcccatcctgggcttcttcaccggcaaggactacaaggacgtgtgcaacaaggtgtgcgagatcctccactacgagggcgccggccacaccttcatcctgcacaccaaggacgatgccattgtggactactttgccaagcgtgtgcccgcctcccgcgtgctggtgaatacccccggcgctctgggcggcatcggcggcaccactggccttcagcccgccctcaccctgggctgcggcgccgtgggcggctccgccacctcggagaacgtgggccccatgcacctgctgaacctgcggtatgtggcctgcggtcagcgtgagctggacgacatccgtgccagcattcccgactgcagcgacggcgtgtgccgcaccgctcccgacctggagaatgtggacatcgaggagatcgtccgcaaggttatcgccagcatccagaaactgtaa

SEQ ID NO: 1148 - protein, 493 aa, Bacteroides capillosus ATCC 29799
MQLIDKDLLSMQEVRELVEAAKVAQRELAAMNQEQVDRIVRAIAEAGVRNARRLAQMAHEDTGFGIVDDKVVKNVFASQGVYEHIKNMKTIGELSRDDSKGIRTIAVPVGVIAGLIPSTNPTSTALYKSEIAIKSGNAIVFSPHPTALRCILETVKVIRQAIAEAGGNENLVSCITIPTMEATDNLMRHRDVAMILATGGSAMVRAAYSSGTPAIGVGPGNGPAYLEKSCDLPLAVKRILDSKTFDNGTICASEQSIICDEDMVPAVRAEMEKQGAYFLDDEEREKLGKFILRANGTMNPQIVGRSVATIASLAGLDKVPPTARVLVARETGVGRGHPYSNEKLGPILGFFTGKDYKDVCNKVCEILHYEGAGHTFILHTKDDAIVDYFAKRVPASRVLVNTPGALGGIGGTTGLQPALTLGCGAVGGSATSENVGPMHLLNLRYVACGQRELDDIRASIPDCSDGVCRTAPDLENVDIEEIVRKVIASIQKL

SEQ ID NO: 1149 - DNA, 288 bp, Bacteroides capillosus ATCC 29799
atggcaactatgacacaggcactgggcatgatcgagactaagggtctcgtggcctctgttgaagcggcggacgccatggtcaaggccgctaacgtcaccctgatcggcaaggagcacgtgggcggcggtctggtgaccgtgatggtccgcggcgacgtgggcgccgtgaaggccgccaccgatgccggcgctgctgccgccgagcgcgtgggcgagctggtcagcgtccatgtgatcccccgtccccatgaggaagtggagtccatcctgccccgtctgaacggctga

SEQ ID NO: 1150 - protein, 95 aa, Bacteroides capillosus ATCC 29799
MATMTQALGMIETKGLVASVEAADAMVKAANVTLIGKEHVGGGLVTVMVRGDVGAVKAATDAGAAAAERVGELVSVHVIPRPHEEVESILPRLNG

SEQ ID NO: 1151 - DNA, 285 bp, Bacteroides capillosus ATCC 29799
atggcaactatgacacaggcactgggcatgatcgagaccaagggtctcgtggcctctgttgaagcggcggacgccatggtgaaggccgctaacgttaccctgatcggcaaggagcacgtgggcggcggtctggtgaccgtgatggtccgcggcgacgtgggtgccgtgaaggccgctaccgatgccggcgccgctgccgctgagcgcgtgggcgagctggtcagcgtccatgtgatcccccgtccccacaatgaggtggagtccatcctgccctctctgaagtaa

SEQ ID NO: 1152 - protein, 94 aa, Bacteroides capillosus ATCC 29799
MATMTQALGMIETKGLVASVEAADAMVKAANVTLIGKEHVGGGLVTVMVRGDVGAVKAATDAGAAAAERVGELVSVHVIPRPHNEVESILPSLK

SEQ ID NO: 1153 - DNA, 807 bp, Bacteroides capillosus ATCC 29799
gtggagcgcttgaaagcaattaccgaggattttctccggctggaattgagaaacgctcagcccgagaccttctatgtgccggagggcaagatcctcacccccgcagcgcgggaatatctgcagcagcgcaagatcaagattgccaagggtgagccccctgaggcggcggcggagtccgccgccccggaggctccggccaaggctcctgctccggcggcgcctgccgccgtacccaccgccaagtaccgggaccatgagaccggcgccttctatatggagaagccggagcacatgacccagctgtgcggcaacgagctggtggccaagaaccatccccgcatcctgttccggggcaagctggacagcctgcaggcgctggtggtgctggcccaggccatgatcgccggcgaaggaagtcccaagctgattgacgatctgggcagcgtcctggacaatctgcgggagatgatgcggtgcgaggtgctggatgagccctatgagcggcagtccatcatcggcctgacccatcaggagctgcgtgagcggtcccacaatccccagaagttcttcggcatcaagcagatgctgctgcccgattacagcatggggcgtgactatgcgctgctcaaccagatccgcgccgccatccgggagaccgaggtggctgccgccggggcgttcctgtcgggcagcaagtgcacccggccggatatcatggaagagctgaatcgcctgtccagcgcgctgcacatcatgatgtgcatgtacctggcgggcatgtatcgtaaggaggatggccgtacatga

SEQ ID NO: 1154 - protein, 268 aa, Bacteroides capillosus ATCC 29799
MERLKAITEDFLRLELRNAQPETFYVPEGKILTPAAREYLQQRKIKIAKGEPPEAAAESAAPEAPAKAPAPAAPAAVPTAKYRDHETGAFYMEKPEHMTQLCGNELVAKNHPRILFRGKLDSLQALVVLAQAMIAGEGSPKLIDDLGSVLDNLREMMRCEVLDEPYERQSIIGLTHQELRERSHNPQKFFGIKQMLLPDYSMGRDYALLNQIRAAIRETEVAAAGAFLSGSKCTRPDIMEELNRLSSALHIMMCMYLAGMYRKEDGRT

SEQ ID NO: 1155 - DNA, 612 bp, Bacteroides capillosus ATCC 29799
atgaaagagattgtatccgctgtcatggacgccattcacagtgccggcatggtagaggtggaggtgtccgcccgccatgtgcacctgagccaggagcatgtggagttcctctttggaccgggcgcaaccctcaccaataagcgtcccctgtcccagccgggtcagttcctggctgagcagcgggtgacgctcatcggccccaagggaaccaaggagcgggtggctgtgctgggccctgtccgcagcgccacccaggtggagctctctcagagcgacgccatggccctgggcgtgaaggcgcccctccgggagtccggcgatgtgaagggctccggggccattaccatccagggcccctgcggcacgctggagctgaaagagggcgccattgtggcccacaatcacatccatgtgaccgctcccgactccatccgtttcaatctgaaggatggccagcgggtctcggttgccctcatgacagagcggccggtggtgttcaaggacgtgatcatccgggtcagctcccacttcagctgcaagatgcacattgatgttgacgaggcaaacgcggccatggttcatggcttcaccctcggcaagatcatccggtag

SEQ ID NO: 1156 - protein, 203 aa, Bacteroides capillosus ATCC 29799
MKEIVSAVMDAIHSAGMVEVEVSARHVHLSQEHVEFLFGPGATLTNKRPLSQPGQFLAEQRVTLIGPKGTKERVAVLGPVRSATQVELSQSDAMALGVKAPLRESGDVKGSGAITIQGPCGTLELKEGAIVAHNHIHVTAPDSIRFNLKDGQRVSVALMTERPVVFKDVIIRVSSHFSCKMHIDVDEANAAMVHGFTLGKIIR

SEQ ID NO: 1157 - DNA, 819 bp, Bacteroides capillosus ATCC 29799
atgatggatctggaccgcgtaaatgcctacctcacccgtgtggaggaatccgagaagaccaccttccgtccggtgggtcagaaactgaagaccggcgtggaccttggcacggcctatatcgtgctggtggtgctggatgaggagaacaaccctgtggcctgcgagaagcaggcggcccaggtcctgcgggacggcgtggtggtggattacaccggcgcgctgcgtatcgtccgggagctgaaagagaagctggaggcccgtctgggcaccgagctggtcaactgcgccatcgcaatgcctgcgggcacggaatccagtgtccgcacccatcagtatgtggcggagggcgccggctttgaagtgaccgagattctggacgagccctctgccgccaatgccatctaccagatcgaaaatggtgtggtggtggacatcggcggcggcaccaccggtctggccatgctgaaggacggcgtggtggtgcagacggaggacgagcccaccggcggtacgcatctgtctctggtgctggcggggaattaccatatttcctttgccgaggccgaggccatcaagcaggattacgcccgtcaccgggagatcctgccggtggtgcggccggtgctggagaaaatggccagcatcgtcaagcggtatgtgagccagagcgacgtagataccatctacctgtgcggcggcacctgctgcctgaccggcatcgagcaagtatttgaaaaggtgaccggcattcacaccgtgaagccggccaatccgttcctggtgacgcctacgggtatcgccatgaactgcaaaatctga

SEQ ID NO: 1158 - protein, 272 aa, Bacteroides capillosus ATCC 29799
MMDLDRVNAYLTRVEESEKTTFRPVGQKLKTGVDLGTAYIVLVVLDEENNPVACEKQAAQVLRDGVVVDYTGALRIVRELKEKLEARLGTELVNCAIAMPAGTESSVRTHQYVAEGAGFEVTEILDEPSAANAIYQIENGVVVDIGGGTTGLAMLKDGVVVQTEDEPTGGTHLSLVLAGNYHISFAEAEAIKQDYARHREILPVVRPVLEKMASIVKRYVSQSDVDTIYLCGGTCCLTGIEQVFEKVTGIHTVKPANPFLVTPTGIAMNCKI

SEQ ID NO: 1159 - DNA, 762 bp, Bacteroides capillosus ATCC 29799
atggatcagagcaagctcattgacgagatccttgcccgcgtagcggcaaagctggcggcggaagaagccccggattgcgcgccggatcccgctgatgagccctccgctgaaaagcccggactgctggtgctctgccagacggaagacccctgctgcagccagctggcggacagcctgaaggagcactttgccgtcacccgcgtctgcaggcaggagggggcggacctgtccgcccagtcctgcgtggtcctgtgccagctgaccaacgatgtgctgagcaagctggcactgggcatctgcgatacgccctacacccgcctggcctctcaggccatcctgatggggaagcgggtgtacatccccaccgaacaggtggagctgtaccgctatgccaccatggctcctgcgccctattacgccatgctcaaggcgcatttggatctgctgaccgcctccggcgcggtgatctgcagccagagcaatctggccggcgcacttgccggcggtggggacagctgtcctcagcccgaacccgagccggagcagcagcctgaaccggcccctgcacccgctcccgaaccggcgcccgcccccagctgcggcaaggagctgaagctggagaagcgggtcctgacggaaaaggacgtcctggacgcagcagcggcccgggtgacctgcatccgtctgccggccaaatgcatcctgacggccctggccaaggactgcgccaaggaccacgggatccggctggagctgggctga

SEQ ID NO: 1160 - protein, 253 aa, Bacteroides capillosus ATCC 29799
MDQSKLIDEILARVAAKLAAEEAPDCAPDPADEPSAEKPGLLVLCQTEDPCCSQLADSLKEHFAVTRVCRQEGADLSAQSCVVLCQLTNDVLSKLALGICDTPYTRLASQAILMGKRVYIPTEQVELYRYATMAPAPYYAMLKAHLDLLTASGAVICSQSNLAGALAGGGDSCPQPEPEPEQQPEPAPAPAPEPAPAPSCGKELKLEKRVLTEKDVLDAAAARVTCIRLPAKCILTALAKDCAKDHGIRLELG

SEQ ID NO: 1161 - DNA, 300 bp, Bacteroides capillosus ATCC 29799
atggtcattggaatgagagttgcaaaagtcatcggcaccatctgggccacccgcaaggaagacagactggcggggctgaagctgctgctggtacagccgctggacgtgctgaccggcggaaaggacggccttcccattgtgtcggccgatatcattggcgccggcgtgggcgagacagtgctggtggtaagcggcagttccgcccggagcgcggtgggagatatgggcatccctgtggacgccactgttgtgggcattgtggacgatcaggagattgacgagagcgtcatccctgaataa

SEQ ID NO: 1162 - protein, 99 aa, Bacteroides capillosus ATCC 29799
MVIGMRVAKVIGTIWATRKEDRLAGLKLLLVQPLDVLTGGKDGLPIVSADIIGAGVGETVLVVSGSSARSAVGDMGIPVDATVVGIVDDQEIDESVIPE

SEQ ID NO: 1163 - DNA, 1359 bp, Bacteroides capillosus ATCC 29799
atgaatctgacagaagcggtcaaggccgcgggcgtggtgggagctggcggcgccggtttccccacccatgtaaaactgtcggccaaggcggagtgcttcctggtgaacgccgcggagtgcgagccgctgattgagaccgacaaatatctctgccggacgtttcccgaccggatcgtggccgccgcagcagcaatagcggcccatctgggggcgaagcggaccgtcattgccctgaagggcaagtacaaggcggagatcgcagcgctggaggactccatcagccgtctcaacgcgccggtggagatcttcaagatgaaaaccttctatcctgccggtgacgagcagaccatggtccagcaggtcaccggccggtcggtccccgagcggggcctcccgctggacgtggggtgcgtggtagataacgtgggcaccctgctcaacattatggacgccctggaggaccggcctgttaccgacaaatatctgtccgtggtgggcgaggtgaaggagcccattatgctccatgtgcctatcggcaccccgctgacggagtgcgtggccgcggctgcgcccaccatcaccaagtatgccatcatcgtgggcggtcccatgatgggcaaggtgctcactgacccggcggccatcgaggcggccgtggtcaccaagaccaccggtaacatcatcgtgctgcccccggatcactatctgttccgccgggcaaccctgtccatggacgccatccggcaccaggccaagagcgcctgcatccagtgccggatgtgcaccgacctgtgcccccgctacctcatcggccaccagatccgcccccatctgatgatgcggaatctgtggcgtgagaagagcgtggaggacaaggaggagtatctggccaccttcggagacgcggccaactgctgcgactgcggcgtgtgcgagatgttcgcctgtcccatgggcctgtccccccgcaaggtgaacagctacctgaagggtgagctgcgcagccgggggatccaggtaccccgcaatatggagcctcaggcccgggagtttgcggacatccgcaagacgcccaccgaccggctcattgctcggctgggcctggcggagtacaacggcctgcacgcccacacctgcatcacgctggagccccagcgtgtgtgcgtccccatgcagcagcacatcggcaagcctgccacccctgttaaggcggagggcgaccgggtttccaagggcgagctgctgggccaggcggcagagggactgtccgccaatatccatgccagtatagacggcgtggtggaaaaaatcacaccggcaggcgtttggctgcgccggaaggaggttgaatcggtatga

SEQ ID NO: 1164 - protein, 452 aa, Bacteroides capillosus ATCC 29799
MNLTEAVKAAGVVGAGGAGFPTHVKLSAKAECFLVNAAECEPLIETDKYLCRTFPDRIVAAAAAIAAHLGAKRTVIALKGKYKAEIAALEDSISRLNAPVEIFKMKTFYPAGDEQTMVQQVTGRSVPERGLPLDVGCVVDNVGTLLNIMDALEDRPVTDKYLSVVGEVKEPIMLHVPIGTPLTECVAAAAPTITKYAIIVGGPMMGKVLTDPAAIEAAVVTKTTGNIIVLPPDHYLFRRATLSMDAIRHQAKSACIQCRMCTDLCPRYLIGHQIRPHLMMRNLWREKSVEDKEEYLATFGDAANCCDCGVCEMFACPMGLSPRKVNSYLKGELRSRGIQVPRNMEPQAREFADIRKTPTDRLIARLGLAEYNGLHAHTCITLEPQRVCVPMQQHIGKPATPVKAEGDRVSKGELLGQAAEGLSANIHASIDGVVEKITPAGVWLRRKEVESV

SEQ ID NO: 1165 - DNA, 540 bp, Bacteroides capillosus ATCC 29799
atgagaaacgccatcggcatggtggagctgaccagcatcgcccggggcattgagacctgcgactatatggtaaaggcagcgcaggtagacctcatccgctcctccaccgtctgtcccggcaagtacatcatcctgatcgcgggtgacactggcgatgtaaaggcctccatggcggagggcatccgtcagggcggcgagtacgtggtcaacacgctgctgctgcccaacgtgcacccccagctcattcccgccatcagcatgaccacccaggtgcctcagggaggcgctctgggcgttctggagttctactccgtggcttccgccattaccgccgccgatgtggcggccaaggcggccaatgtgaccctcatcgaggtgcgcatcggctacgccatcggcggaaagggctatgtgaccctgaccggcgatgtgggcgccgtccgtgaggcggtagccgctgccgcgtcggccactgacctgctggtcagcaccagcgtcatccccaggcccgcacctcagctcttccagagcctgatgtga

SEQ ID NO: 1166 - protein, 179 aa, Bacteroides capillosus ATCC 29799
MRNAIGMVELTSIARGIETCDYMVKAAQVDLIRSSTVCPGKYIILIAGDTGDVKASMAEGIRQGGEYVVNTLLLPNVHPQLIPAISMTTQVPQGGALGVLEFYSVASAITAADVAAKAANVTLIEVRIGYAIGGKGYVTLTGDVGAVREAVAAAASATDLLVSTSVIPRPAPQLFQSLM

SEQ ID NO: 1167 - DNA, 1233 bp, Bacteroides capillosus ATCC 29799
atggatttcagcgaactgattgcagctgccgaccccagcgtttttactgagagcatcaaggcatgggtatccaacatttccatcaactccgtgatcatgctgatcatgatgatcttcatggtcgtgggtgccatcgacaagatccgcggtaacaagctgggttatggcgagaagtttgaagagggcttcaacgccatcggcgctctggccatcgccatggccggcgttgtggcggctgcgcctgtgctgtccatggtcctcggccccatcatcaagcccatctacaccgctatcggtgctgatgcctccatgtttgccaccaccctgctggcctgcgacatgggcggctaccccctggccatggagctggccgccgatgagtccatcggtaacttctccggcctgatcctgggcaccatgatgggccccaccatcgtgttcactatccccgttgctctgtccatcatcaagaaggaagaccgtccctacctgggctccggtatcctggctggtatgatcaccatccctctgggctgcatcgtcggcggcatcgtgatgaacctgctcactccctatgagctgagcattggccgcatcctgatcaacctggtgcccgttatcgtgattgccgccctgatctgcgtcggcctgtggttcgcccccggccccatgatcaacggcttcaataagttcggcaccggcgtcaccgtggtcatcaccgccctcaccgccatcgccgtgttccagcagatcaccggcatcatgttccccgtgttcagcatcatgtccgagaaggacgccaccaccggcctgtccggcctggacagcggcctgctgacctgcggccagatcggtatcgttctgatcggcgccttccccatggttgagtggatcacccgcaccttcggcggcgcgctgaagaaggtgggcggcctgctgggcatgaacgaggctggttccgccggtatggtggccaacctggccaacaacatcgccatgttcaacatcatgggcgatatgaaccccaagggcaagctgctgaacgtggcctttgccgtgtccgccgccttcgtgttcggcgatcacctgggcttcaccgccggcaacaaccccgacatgatcttccccgttatcgtgggcaagctggtggccggtatcaccgccatcatcgtggccaacatcctctcccccaagctgctggctaagattaattccgccaaggctgctgcctga

SEQ ID NO: 1168 - protein, 410 aa, Bacteroides capillosus ATCC 29799
MDFSELIAAADPSVFTESIKAWVSNISINSVIMLIMMIFMVVGAIDKIRGNKLGYGEKFEEGFNAIGALAIAMAGVVAAAPVLSMVLGPIIKPIYTAIGADASMFATTLLACDMGGYPLAMELAADESIGNFSGLILGTMMGPTIVFTIPVALSIIKKEDRPYLGSGILAGMITIPLGCIVGGIVMNLLTPYELSIGRILINLVPVIVIAALICVGLWFAPGPMINGFNKFGTGVTVVITALTAIAVFQQITGIMFPVFSIMSEKDATTGLSGLDSGLLTCGQIGIVLIGAFPMVEWITRTFGGALKKVGGLLGMNEAGSAGMVANLANNIAMFNIMGDMNPKGKLLNVAFAVSAAFVFGDHLGFTAGNNPDMIFPVIVGKLVAGITAIIVANILSPKLLAKINSAKAAA

SEQ ID NO: 1169 - DNA, 441 bp, Bacteroides capillosus ATCC 29799
atgaatgtaagtgaagaactgatccgtgaaatcgtcagcaaggttctggaggccgcttccggcaaacaggacgacggtttcgtcaaggaggtcgatcccagcggtatcatcgggatcaagaccagcaccgtcaagtgcgagcctttcgagcaggacggcgtgaagctcaaggacgtggtcactctggaggaggccccccgtatgggctgcggcatcatggagctggaccacaccagctttgagtggacgctgacctatgacgagtatgacatggtgatcgacggcactctggagatcgagattgacggacgtgtgatttccggcggccctggcgatatcatctatatccccaagggaagccacatccacttccagactccggacaagacccggtacgcttacttcgtctatcccgccaactggcaggagctgctggactga

SEQ ID NO: 1170 - protein, 146 aa, Bacteroides capillosus ATCC 29799
MNVSEELIREIVSKVLEAASGKQDDGFVKEVDPSGIIGIKTSTVKCEPFEQDGVKLKDVVTLEEAPRMGCGIMELDHTSFEWTLTYDEYDMVIDGTLEIEIDGRVISGGPGDIIYIPKGSHIHFQTPDKTRYAYFVYPANWQELLD

SEQ ID NO: 1171 - DNA, 195 bp, Bacteroides capillosus ATCC 29799
gtgcgtcatatgcaggcaggtattctgactcaggcattcagcgcagcccccgccttcccggcgtctccgccagtggcatctgaggaccgctccgccaatacagcaacggcattgtgcgggattctcacccgcttcccttttgataaacctgcatacccatgtgattcactttttctgctgtccccggcccgctga

SEQ ID NO: 1172 - protein, 64 aa, Bacteroides capillosus ATCC 29799
MRHMQAGILTQAFSAAPAFPASPPVASEDRSANTATALCGILTRFPFDKPAYPCDSLFLLSPAR

SEQ ID NO: 1173 - DNA, 144 bp, Bacteroides capillosus ATCC 29799
ttgcggacaacaggtccgcaccgcgccattcttttcccggcaagcaaaagcccggggagctatgtgctccccgggcttttgctcagcctgttgaaaaagtcttttcgacaggctgctgcactttttcaacctttgaaaaagtga

SEQ ID NO: 1174 - protein, 47 aa, Bacteroides capillosus ATCC 29799
MRTTGPHRAILFPASKSPGSYVLPGLLLSLLKKSFRQAAALFQPLKK

SEQ ID NO: 1175 - DNA, 288 bp, Bacteroides capillosus ATCC 29799
atggcatattcccaagcgcttggtatgattgaaacaaagggcctggtggcctccgtggaggccgccgacgccatggtcaaggccgccaacgtgaccctcatcggcaaggtccatgtgggcggcggcctggtgaccgtcatggtccggggcgatgtgggcgccgtgaaggccgccaccgacgccggcgccgccgctgctgagcgggtcggcgagctgtgctccgtacacgtcattcccagaccccacgaggaagtggagtctatcctgcccgctgcggagaagcagtaa

SEQ ID NO: 1176 - protein, 95 aa, Bacteroides capillosus ATCC 29799
MAYSQALGMIETKGLVASVEAADAMVKAANVTLIGKVHVGGGLVTVMVRGDVGAVKAATDAGAAAAERVGELCSVHVIPRPHEEVESILPAAEKQ

SEQ ID NO: 1177 - DNA, 675 bp, Bacteroides capillosus ATCC 29799
atgacgcagggaggaaacaaaaccatgaaacgtgatcctgtaaaagcatccgtgatggccacacggattatccccaacgtggctgccgacatggcccaggagctgggactcctgcccggcgaaaagtctctggccattatcaccgccgactgcgatgatgtgacctacaccgccctggacgaggccaccaaaaaggcggtctgccgggtggcttacgccaagagcttctacgccggcgccgccaacgccaacaccgctctggcgggcgaggtcatcggcatcctggccgctcccaacccggctgaggccagagcagcgctggaagcctgtgtggacgtcattgaaaaccaggcctactttgtctccgccaatgcagacgactccgtggtctactacgcccactgcatcccccgcaccggctcctatctgtctgagggcgccggtatcaacgagggcgaggctctggcctacctgattgcgccccctctggaggccatgtacggtgtggatgccgctctgaaggccgccgacgtgcgcatgtgcgtgctctatgcgcccccttccgagaccaacttcggcggcgctctgctgaccggcagccagtccgcctgcaaatccgcctgcgacgcctttgccgccgctgtggagcaggtggccgaccagccccgtatctga

SEQ ID NO: 1178 - protein, 224 aa, Bacteroides capillosus ATCC 29799
MTQGGNKTMKRDPVKASVMATRIIPNVAADMAQELGLLPGEKSLAIITADCDDVTYTALDEATKKAVCRVAYAKSFYAGAANANTALAGEVIGILAAPNPAEARAALEACVDVIENQAYFVSANADDSVVYYAHCIPRTGSYLSEGAGINEGEALAYLIAPPLEAMYGVDAALKAADVRMCVLYAPPSETNFGGALLTGSQSACKSACDAFAAAVEQVADQPRI

SEQ ID NO: 1179 - DNA, 879 bp, Bacteroides capillosus ATCC 29799
atgaacgaatctcagctgaaagagattatcatgaagactatttccgaactgatggcgggtgaatccggggacaagtgcgcctcctgcgcgcccactcccgccctcaaggtggaagatggtgaggtgcccgatctgtccgcggtggactaccgcaaggtaatcgacgtgcccaaccccgccaacggtgaagagtatctccacatgcgctccaagaccgtggcccgtctgggcgtgtggcgcgccggtccccgctaccgcaccaacaccttcctgcgcttccgcgccgaccacgccgtggctatggacgccgtctttaccgacgtgcccaacgaggtcctggaggaggccggtctgttctccgtgagcaccctctgtgagagtaaggacatgtatctgacccgccccgacctgggccgccgtttctccgatgagaccgtcgccgagctgaagaagcgctgcaagctgaaccccgacgtccagattgtggtgtccgacggtctgtccagcacctccgtcaccgccaacatcaaggacatcctgccctccatcctccagggcctgaaggccgccggggtgagcgtgggcactcccttcttcgtcaagtacggccgcgtgggcgccatggacgccatcactgaggcgctgggctccaaggtcaccgtgatcctgctgggcgagcggcccggtctggccaccggcgagtccatgagcgcttacatgacctacggcggctatgtgggcatccccgaggccaaccgcaccgtggtctccaacatccaccggggcggcaccaatcccgccgaggccggcgcctttatcgccgagctgtgctgccgtatgctgaaggaaaaggcctccggcctggacctgaaggtctga

SEQ ID NO: 1180 - protein, 292 aa, Bacteroides capillosus ATCC 29799
MNESQLKEIIMKTISELMAGESGDKCASCAPTPALKVEDGEVPDLSAVDYRKVIDVPNPANGEEYLHMRSKTVARLGVWRAGPRYRTNTFLRFRADHAVAMDAVFTDVPNEVLEEAGLFSVSTLCESKDMYLTRPDLGRRFSDETVAELKKRCKLNPDVQIVVSDGLSSTSVTANIKDILPSILQGLKAAGVSVGTPFFVKYGRVGAMDAITEALGSKVTVILLGERPGLATGESMSAYMTYGGYVGIPEANRTVVSNIHRGGTNPAEAGAFIAELCCRMLKEKASGLDLKV

SEQ ID NO: 1181 - protein, 1370 aa, Bacteroides capillosus ATCC 29799
ATGAAGTTGAAAACGACCTTGAATGGCAGCAGCTTTGCATTCCGCGACATTAAGGACGTGCTGGCAAAGGCCAATGAGCCCAAGTCCGCCGACCGCTTCCAGGGCATCGCGGCGGAGACCGCCACCGAACGCGTGGCCGCAAAGATTGTGCTGTCCGAACTCACCGTGGGCGACCTGACCGAGAACCCCACCATCCCCTATGAGAAGGATGAGGTTACCCGGGTCAACATCGACGGCCTGAACCGCCCCATGTACGAGCGGTTCAAGAACATGACCATCGGTGAGCTGCGCGAGTGGATTCTGGACCACAAGACCACCACTGAGGAGCTCTGCCGGGCCAGCCGCGCCTTCACCGGCGAGGTGGTTGCCGCTGTGGCCAAGCTGATGAGCGCCATGGACCTGGTGTACGGCGCCAGCAAGATCGTCCGTCCCACCAAGTGCGTCACCGAGATCGGCCTGCCCGGCACCCTGTCCTACCGCTGCCAGGCCAACAGCCCCACGGACAGCGTGTCCGACATCCTCATCGGCGTGATGGAGGGTCTGTCCTACGGCTGCGGCGACGCCTGCCTGGGCATCAACCCCGTCACCGACGACGCCGAGACCACCAAGCGTATCGCCGACGCCCTCTGGGATCTTGTAAAGAAGAACAGCATCCCCACCCAGATCACCGTGCTGTCCCACATCACCACCCAGATGCAGGCCGTCCGCAACGGCGCCCCCCTGTCCATGTTCTTCCAGTCCATCGCCGGCACTCAGGCTGCCAACGACAACTTCGGCGTCAGCCGTGCCCTGCTGGAGGAGGCCTACGATCTGGCCCGCTCTTCCTGCACCGGCCTTGGTCCCAACCTGCTGTACTTTGAGACCGGCCAGGGCTCCGAGGTGTCCATCGGCGCCGACTGCGGCGTGGACGAGATGACCCTGGAGGCCCGTACTTATGGCTTCGGCCGCTTCTTCCTGCCCTTCATGGTCAACAACGTGTCCGGCTTCATCGGGCCCGAGACCCTGTACGACGGCAAGGAGATGATCCGCGCCAACCTGGAGGACCACTTCATGGGCAAGCTCATCGGTCTGCCCATGGGCATGGCCCCCTGCTACACCAACCACACCTCCATCACCCAGGACGATCAGGAGATGGCCACCGCCCTGCTGGCCATGGCCGGCGCCAACTACTACATGGGCGTGCCTGTGGGTGACGACGTGATGCTGTCCTACCAGGACACCAGCTTCCACGACGACGCCACCCTCCGCGAGCTGAGCCACCGCCTGCCCGCTCCCGAGTTTCACAAGTGGATGATGAAGATGGAGCTGATGGACGAGCACGGCCGCCTCACCCCCAAGGCCGGCGACGCTTCCATTTTCCTGAAGTGAZP

SEQ ID NO: 1182 - protein, 455 aa, Bacteroides capillosus ATCC 29799
MKLKTTLNGSSFAFRDIKDVLAKANEPKSADRFQGIAAETATERVAAKIVLSELTVGDLTENPTIPYEKDEVTRVNIDGLNRPMYERFKNMTIGELREWILDHKTTTEELCRASRAFTGEVVAAVAKLMSAMDLVYGASKIVRPTKCVTEIGLPGTLSYRCQANSPTDSVSDILIGVMEGLSYGCGDACLGINPVTDDAETTKRIADALWDLVKKNSIPTQITVLSHITTQMQAVRNGAPLSMFFQSIAGTQAANDNFGVSRALLEEAYDLARSSCTGLGPNLLYFETGQGSEVSIGADCGVDEMTLEARTYGFGRFFLPFMVNNVSGFIGPETLYDGKEMIRANLEDHFMGKLIGLPMGMAPCYTNHTSITQDDQEMATALLAMAGANYYMGVPVGDDVMLSYQDTSFHDDATLRELSHRLPAPEFHKWMMKMELMDEHGRLTPKAGDASIFLK

SEQ ID NO: 1183 - DNA, 147 bp, Bacteroides capillosus ATCC 29799
atgggcgatgtagtccaggggcagttttccgctgcctctgggctattttgcattttttactccccaacggcctgtacgcaggccgaacaagccggacgcgcacctgcgcccggaatatcaaacaaggagaggtgcagcgaaacatga

SEQ ID NO: 1184 - protein, 48 aa, Bacteroides capillosus ATCC 29799
MGDVVQGQFSAASGLFCIFYSPTACTQAEQAGRAPAPGISNKERCSET

SEQ ID NO: 1185 - DNA, 1374 bp, Bacteroides capillosus ATCC 29799
atgattagcgccaccagaatgctctgccagaaatatacctcgctcacggacgatgagataagctatctcgagtcctacaacaccctcctgcccgccatggccaacgcggaaaaggcggacgtgtttgtggactgccggacagccaccgggcgctctgccatcgtggtctgcgaggcaaagccccagaccgtcccgtccaattacagcagctccatcctgggcatgatgatccagtggatcgatgagcctgcggtggaccgttccttccggctgggcgtatccacagccggaatgcgggcggtgtccatgccggaggaccggcggattgtccagagcgtggaccccatcttttacagaggccgcctgatcgcggtgctcatctacgagaagcccgccatggatgtggagtccatcctctccgcatcccagccggcgccaacagatacatcggccgatctgggctggtccgctgtggccgacgcactgggcgaggccgtggtctttctggaccaaaaccggcaggtctgcggctacaaccgggaggcggaacgcctctaccgcgccatgggttatgtgggggagctgctggggatgcccggcagcaatatccagcctgccgccgcagaggcctgtgacggagcatggcacgagacctgtatggtcaaccgaaatttacagtaccgaaaactcccgctcaccgacggcaaggccgccgaggtcctgattatgcgggatatcaccgagcagcgcaggctggaacaggagctgaattttcagaaaacagccctgcgggagctgcgtcacaggatgaaaaacagcctgcagatgatggccaatctgatccgcgccagaggctatgaggtggagagcctgacagaggcccagtccggcatgatggacgccgccaaccggctgctctccctcaccgccacactggacggtctggctcaggcctcgccggagaaggtgtccctgctgcaggtcatccggcacatccggcagtacaccctgcagacgctggtgaactccaccggaaacattacgatacaggtgtcgggacaggatgtggaagtccggcccgactgcgccgattccatcgccctggtggtcaacgagctgcttcagaacgcgctgaagcacgccttcccatcgggtgcggccggaacggtaggcatcgagctccagagcggacgccctgccagcagaattaccgtatgggacaacggcgtgggcctccagaaggaccagacccggtccggcggaatcggcctggagcttgtatataccattgtccgcgaccgtttgatgggcgagtgcgacctggaaagcggtcccgacggaacaagagttacatttgattttatagaagcatag

SEQ ID NO: 1186 - protein, 457 aa, Bacteroides capillosus ATCC 29799
MISATRMLCQKYTSLTDDEISYLESYNTLLPAMANAEKADVFVDCRTATGRSAIVVCEAKPQTVPSNYSSSILGMMIQWIDEPAVDRSFRLGVSTAGMRAVSMPEDRRIVQSVDPIFYRGRLIAVLIYEKPAMDVESILSASQPAPTDTSADLGWSAVADALGEAVVFLDQNRQVCGYNREAERLYRAMGYVGELLGMPGSNIQPAAAEACDGAWHETCMVNRNLQYRKLPLTDGKAAEVLIMRDITEQRRLEQELNFQKTALRELRHRMKNSLQMMANLIRARGYEVESLTEAQSGMMDAANRLLSLTATLDGLAQASPEKVSLLQVIRHIRQYTLQTLVNSTGNITIQVSGQDVEVRPDCADSIALVVNELLQNALKHAFPSGAAGTVGIELQSGRPASRITVWDNGVGLQKDQTRSGGIGLELVYTIVRDRLMGECDLESGPDGTRVTFDFIEA

SEQ ID NO: 1187 - DNA, 603 bp, Bacteroides capillosus ATCC 29799
ttggatgcgaagggagcaaactgcacgaccatttttttggccgacgatgatgcaacagtgcgtcagacactgaacgacttctttgccaagtgcccaaattatcaggtggttggtaccgccagcaacggtatggatgcggtggagcgctgcaagcagctgcggcccgacgtggcgctcctggatatccagatgcccctgctggacggaatcgccgcagccaggctcattctggaaaacaagtataccaagtgtgtggtcatgctgaccgccttcagcgaccgggcctacatccaggacgccctggacgcaggcgctttcggctacctcaccaagccctttgagccggaaaaaatacttccaacactggaattgtgcatccaccagagccgtgagttccatctgctccgcaaggagctgaaaaatctggagcggcgcgccgaagagcgccccgccgtggaccgggccaagctgatgctgatggagatcaggggcatgtcggaggatgaggcgtatcagtacatacgggaactcagccgcagaaagggcatgtccatgatgaaggttgcacagtatattattgcgaaactggagtcatcccaatga

SEQ ID NO: 1188 - protein, 200 aa, Bacteroides capillosus ATCC 29799
MDAKGANCTTIFLADDDATVRQTLNDFFAKCPNYQVVGTASNGMDAVERCKQLRPDVALLDIQMPLLDGIAAARLILENKYTKCVVMLTAFSDRAYIQDALDAGAFGYLTKPFEPEKILPTLELCIHQSREFHLLRKELKNLERRAEERPAVDRAKLMLMEIRGMSEDEAYQYIRELSRRKGMSMMKVAQYIIAKLESSQ

SEQ ID NO: 1189 - DNA, 432 bp, Bacteroides capillosus ATCC 29799
atggaactgaatgaatctatgctccgtcaaatcatcgagcgtaccctgcaggaaatgcgcggggacggcatggtaaagcatgtggaccccagcggcgtgatgagcatccgcaccagcaccgtccgctgtgagccttttgccggcgccaagggcgtgggtctgaaggacgccaccacgctggaggaggccccccgtatgggtgccggcgtgatggagctggaccacggccagctggagtggaccctgacctatgatgagtacgactatgtcatcgagggcaccctccagattgagattgacggccgcgttgtgaccggcaatgccggcgacatcatctatatccccaaaaacagccacatcatcttcaagacccccagttggacccgctacgcctacttcgtctaccccgccaactgggctgatctggtctga

SEQ ID NO: 1190 - protein, 143 aa, Bacteroides capillosus ATCC 29799
MELNESMLRQIIERTLQEMRGDGMVKHVDPSGVMSIRTSTVRCEPFAGAKGVGLKDATTLEEAPRMGAGVMELDHGQLEWTLTYDEYDYVIEGTLQIEIDGRVVTGNAGDIIYIPKNSHIIFKTPSWTRYAYFVYPANWADLV

SEQ ID NO: 1191 - DNA, 519 bp, Bacteroides capillosus ATCC 29799
atgaagaaattgtttttgatgggcagaagcgaggcgggaaagacctctctgacccaggtgctgaacggcgaggagctgcactatcacaagacgcagtacaccaacaccggggaggacgtcatcgactctccgggcgagtactctgagaccaagcggtgcggtctggccctggcctgcttctcctttgaggcggacgtgctggcgctgctgatggcggcggacgagccctttggtgtctttgagcccaattgccagtgctttaccaaccgcccgctgattggtatcatcaccaaaattgattcacccattgccaatgtgcccatggtccgcaggtggatgattaattcgggctgtgagcgcatttttgaggtaaacaatgttacccgagagggcgtggatgagttactggagtatctgaaagatgatccggtgaaactgacgctggagcaggccaaggagcggcagagacgggggatccctgagtggtccgagtcggtgccgcagcctgtggcggaataa

SEQ ID NO: 1192 - protein, 172 aa, Bacteroides capillosus ATCC 29799
MKKLFLMGRSEAGKTSLTQVLNGEELHYHKTQYTNTGEDVIDSPGEYSETKRCGLALACFSFEADVLALLMAADEPFGVFEPNCQCFTNRPLIGIITKIDSPIANVPMVRRWMINSGCERIFEVNNVTREGVDELLEYLKDDPVKLTLEQAKERQRRGIPEWSESVPQPVAE

SEQ ID NO: 1193 - DNA, 432 bp, Bacteroides capillosus ATCC 29799
atggggagccggatgactcgggaagagttcctggagaggatcttttctcaaaagtatgaggatctgaaagggaagcatctgcgcattgtccgggtgaaggtgatcggcagggcgatttcgctggcccagcttatcggcgtgtctgaccggcggatctacgagaacctgggccttcatatcggaacccatcagggcgaggaccacaccggagagtccatcggcctgctgcacatcacgccgtgggaggccacggtggctgcggcggacatcgccatgaagagcggagatgtagagctgggctttctggaccggttcagcggtgcggtcatccttctgggaaaccgtgcggaggtcaagagcgccctggaagcggtcctgacctacttccgtgaagaactgcatttttcggtttgcgaccttacggagcgttga

SEQ ID NO: 1194 - protein, 143 aa, Bacteroides capillosus ATCC 29799
MGSRMTREEFLERIFSQKYEDLKGKHLRIVRVKVIGRAISLAQLIGVSDRRIYENLGLHIGTHQGEDHTGESIGLLHITPWEATVAAADIAMKSGDVELGFLDRFSGAVILLGNRAEVKSALEAVLTYFREELHFSVCDLTER

SEQ ID NO: 1195 - DNA, 420 bp, Bacteroides capillosus ATCC 29799
atgctggccttctctcagagacggacctttgcaaatcatgaagagggatgggatgacatgagcgaaacgaacgaccagatcagaatcgtacaggagagcgtcgcgggaaaggagattaccttcgcccacgtaatcggcggtcctgcccccattatctatcagaagctgggactcaaccccgccattgattacggcgctgccgcaatcggtattatgaacatgacgccgccggagtccgcggtcatcgcggcggatatcgccatcaagagcgcggatgtgtatctgggctttgccgaccgctttaccggcaccatgatcatcgccggtgagatcgcagacgtcaccacggcgctgaccgaagtggtggattacttccgggacaccatgggctacgtggtgtgcaagattacgaagagataa

SEQ ID NO: 1196 - protein, 139 aa, Bacteroides capillosus ATCC 29799
MLAFSQRRTFANHEEGWDDMSETNDQIRIVQESVAGKEITFAHVIGGPAPIIYQKLGLNPAIDYGAAAIGIMNMTPPESAVIAADIAIKSADVYLGFADRFTGTMIIAGEIADVTTALTEVVDYFRDTMGYVVCKITKR

SEQ ID NO: 1197 - DNA, 2878 bp, Opitutus terrae
atgaaaccccattgtttgttcgtcgcgggagcgttttccgcggcgatgacgtgtccgcgacgcgggcgcaaacggcgagcccggccccgaccgagcgccttcggaagaggaacccgtcgttctctcgcccttcaaggtcgatgcctccgcgacaagggctatcgcgccaccaactcgatctccggcacgcggctcacaccgcgatcaaggatctgccgatgcccatcgaggtgatcaccgaggaatcctgcgcgacaccggtgcgcgcacgctgcgcgattcgctgcgctacagtcgggcatcctgctgcagacgcagaacgactactcggcgcccgcgggcatttctccaccagtccgggcaagatcaataacccggagggcatgacggcggcgcgacgcaaaccaacatgaagatccgcggcttccagaccgagtcggtctgcgcgacggtttccgccggcagaacgccaccgattcggtgaacatcgccgcgtcgagatcgcgcgcgggccggcctcgctgctctacggcgtcggcacttcggcggcgtggtgaactacttggtgaagcagccgctgcgcgagcggccaccgaactctcggccacttacggcagcgacaacttcatgcgggcgagctcgacacgacgggtccgatcacggcgaacggaagcgtggcgtatcggtgaccggcgcgtggcaggacaccggctcctacacggacttcaacgacgaaatcactatttcatttcgccggtcgtgagctggcggccgttcgagagcacgaactggttttcgacgtcgaatacggccaccagaaaaacatgggcatcgctggcagacgctccgcgcggtggcgtcgccctacgtcaacgaggcgtcggctacaacggcaatttttatcagatccccggcagggacgtgcgcgaattcggtggagcggaccggacacctatcgcgacggcgagtcggcgaatttttggtgaagctcacgcagcggatcaccgacaatctgcacctgctggtcgggtgaaccgctcgacgttcaactacgaccagctcgacaacctcgcgcattccggcggatcgagggcgatccgggcgacatcgcctgggcggtggcgccgtgacgtatgcgggactctcctcgacgcagtcgggcattccggtcgggcccagccgtcggcgatcggttaccaatgggagctgcggcagcaggaggacggcacgaccaggttcgcgccgagctcaattttgccggcgagctgtttaggattcttcgaagtggctgcggatgaagcactcgttgctcggcggattcagtatacgcgggagacctccgagtatcacacgcgccagacgccaggcgacgggtgaactaccacagtccggccgactacagctattttcggtttggacagagggcaacggcacgccggaccacccgctcgtcgagtgggacaaccaggaaccacggtttcaaacccggcgctttatctggtctaccagggccggctgcggacgaccggctgacgctcatcggcggcacgcggcgggatcggagttggacagcgtgtggcagtataatccgcagtatcgctccgacggcacgaaaggggcgacgccgagcgcacggatctgcggagcgacacgaacaaggacacgattaccagtggggcgcgagcctcgcgatcacgccgaagaaggatctgtcgtttactggatgcgctccgaaggcgtgcagccgaactaccaaggcaagctgatctctacggacggccgttgcaggcagcgatcgcgacgaacaaggagacggcttgaaattcgacctcttcggcggacgactctccggcacgatcagcagttcaagatcgtccgcgaacgcgggcaggtgggcagctcgagtctcgttggtttgcgcccgtggtttcgggcaacctgaagttcgatccggcgaaggcatcgtttaccgggtcgacgaactcaatcccgtgactaatgactggaacgcgccgccgtcgcgtctgcggcgcagtgggacgctgcggtggccgccggtcggtttaccaggcgacaaactccgccggcgagacgcactggtatgcgacgcgtccaagcccaccggcgcggcgctgctcgacgcggtgttcgcgaacttcacgcccagaaacaatacggctggtggggctggatctacggtggagcgatcccggcagtctgccgttcgacaacctcgtcaacaacgcgacgatggcgacaacggcgcgcagcgcgcggtcgccaccggcaccgaccagtcgaaagctgggatacgcagatcatctggtcgctgaccgacaatctgcaggtcgtgccacgtggtcgcacatcgagaaacgggtgctcaatgcacaggcgtggggaagtatccgtatccgcaggatcgctgggcgatctggtatgccccgattcgtgggccgcgaccgccggccggccgctcagcgaagtctacacggacccaccgacacctcgacgttcatcgcgttcggcaaagggctgccgatggacgcacgccggaaaaccaggcgacgctgtgggtgaactacaagttcaccgaagcacgatgaaaggctggtcgttcggcgcgggcggttggtgggaggacgacgttcgatctatccggcctacggccagaatgcgctcgataaccaaggcacccgatcttcctctccacgaaggcccgcacctcggtcaacgcgatggtggttacgaattcctgctgcgcggtcgcgagtcgagcgtgcagctcaacgtgacaacgtgctcaacgaccgggacctctacggcttcatctacgccgcacgatccgctggcagctgtcgttcaatcatcggctcta

SEQ ID NO: 1198 - protein, 974 aa, Opitutus terrae
MKPHCLFVAGAFSAAMIVSATRAQTASPAPTERASEEEPVVLSPFKVDASRDKGYRATNSISGTRLNTAIKDLPMPIEVITEEFLRDTGARTLRDSLRYSSGILLQTQNDYSAPAGSFSTSPGKINNPEGMTASATQTNMKIRGFQTESVLRDGFRRQNATDSVNIDRVEIARGPASLLYGVGNFGGVVNYLVKQPLRERATELSATYGSDNFMRATLDTTGPITANGSVAYRLTGAWQDTGSYTDFNDENHYFISPVVSWRPFESTELVFDVEYGHQKNMGIGWQTLRAVASPYVNEASGYNGNFYQIPGRDVREFRWSGPDTYRDGESANFLVKLTQRITDNLHLLVVNRSTFNYDQLDNLAHFRRIEGDPGDIAWAVAPVTYAGLSSTQSGIPVGPQPSAIGYQWELRQQEDVHDQVRAELNFAGELFRDSSKWLRMKHSLLGGFSYTRETSEYHTRQTPGDVVNYHSPADYSYFRFGQQGNGTPDHPLVEWDNQETTVSNPALYLVYQGRLLDDRLTLIGGTRRDRSWNSVWQYNPQYRSDGTKGDAERTDLRSDTNKDTTYQWGASLAITPKKDLSIYWMRSEGVQPNYQGKLDLYGRPLQAAIATNKEIGLKFDLFGGRLSGTISKFKIVRERGQVGSSSLVWFAPVVSGNLKFDPAKDIVYRVDELNPVTNDWNGAAVASAAQWDAAVAASVYQATNSAGETHWYANASKPTGAALLDAVFANVHAQKQYGWWGWIYGGDPGSLPFDNLVNNATMDDNGAQRAVATGTDQSKGWDTQIIWSLTDNLQVVATWSHIEKRVLNAQAWAKYPYPQDRWAIWYAPISWAATAGRPLSEVYTDPTDTSTFIAFGKGLPMDDTPENQATLWVNYKFTEGTMKGWSFGAGGWWEDERSIYPAYGQNALDNQGNPIFLSTKARTSVNAMVRYEFLLRGRESSVQLNVDNVLNDRDLYGFIYAAPIRWQLSFNHRL

SEQ ID NO: 1199 - DNA, 1401 bp, Opitutus terrae
atgtattcacacttccgctcactcacgttgctggcatcgtttggcggcggtcgttcgcgtttgccgccggcgtgccctccgcgcaggtttacctgacgaaaaagacgcgccgcaccggctcgcggcgaccggagccttgcgcttcgcccgttgccccagcccatggagaagcagcagtgcgtgtttgtggatccgagcacgagttcgaaacactgctcggcattggcggcgcgatcaccgacgcgcggcggagacattcgacaagctgccggagacgaaacgcgcggagctgctcgcgcctactacgatccacgagccgggatcggttactcgctcgcgcggaccacatcaacagctgcgatttttcctccggcagctacacctacgtggcgagggtgaccgcgagctgaagagcttcgatatcgcgccggacctgcgacacggatcccgctgctgcgggcggcgctgaagaccgccggaccggggttgaggtttacgccagcccgtggagcccaccggcgtggatgaaggacagcggcacatgctgcatggcggcaagctgcggccggacatgcgcgcggcgtgggcaactatttcgtaaagttcatccacgcctatgaacaagcgggcgtgccgcctggggcgtgacggtgcagaacgagccgatggcggtgcagatctgggagcgtgcatcttcacggcggaggaggagcgcgacttcgtgcgcgatcacctggcccgacactgaaggcgagcgggctgggcgggaagaagatcgtcggctggaccacaaccgcacgcaactctaccagcgcgcgacgacgttgctcagcatcctgccgccgcgcagtatctgtggggcctcgggtttcactggtatgtaacgacacgttcgaaaacgtccgccgcgtgcgcgatgccttcccgcaaggcagttgatgatgaccgaggggtgcaacggaccattcgatttcgccaagtgaacgactgggatctggccgaaaactacggccgctcgatgatccacgattcaacaacggtgcggtcggttggaccgactggaacatcctgctcgacggacgggcgggccgaaccacgtggggaacttctgctttgcgccggtgcatgcgacacgcggacgggcgagctgcatttcacgccggcgttctactacatggccatttttcgaagttcatccgacccggcgcgcggcggatcatcgcctgccgacggtggaccggttgatcgcgacggcgttcaaaaacaccgacggcgcatcgctgtcgtggtgatgaatcagtcggccgaagatcagccgttccagtctggatgaacggccaggcagcgtctacgcgctgtccggcgcggtcgacatgacggtggtgatcggggtggagcagt

SEQ ID NO: 1200 - protein, 474 aa, Opitutus terrae
MYSHFRSLTLLASFGGASFAFAAGVPSAQVYLTQKDAPHRLAATGALRFPLPQPMEKQQCVFVDPTHEFETLLGIGGAITDAAAETFDKLPETKRAELLRAYYDPRAGIGYSLARTHINSCDFSSGSYTYVAEGDRELKSFDIAPDLRHRIPLLRAALKTAGPGLTVYASPWSPPAWMKDSGDMLHGGKLRPDMRAAWNYFVKFIHAYEQAGVPLWGVTVQNEPMAVQIWESCIFTAEEERDFVRDHLGPTLKASGLGGKKIVGWDHNRTQLYQRATTLLSDPAAAQYLWGLGFHWYVNDTFENVRRVRDAFPQAQLMMTEGCNGPFDFAKMNDWDLAENYGRSMIHDFNNGAVGWTDWNILLDETGGPNHVGNFCFAPVHGDTRTGELHFTPAFYYIGHFSKFIRPGARRIIASPTVDRLIATAFKNTDGSIAVVVMNQSAEDQPFHVWMNGQAASTRCPARSIMTVVIGVEQ

SEQ ID NO: 1201 - protein, 767 aa, Opitutus terrae
ATGCGCGTGCCCCTGCACATCGTGGAAAAACGCCGGGAGCAGCTCCGGCGCTGATCCGCACCGACGGATTCCTTCCGATCGCCGAGATCTGCCGCCGGTGGAAGTCTCCGAGGCGACCGCGCGCCGCGATCTGGTCGCCGTTGCCGCTCCGGCCACATCACGCGGACGCGCGGCGGCGCGCTGGCGGACTACAACAGACGTTCGCCTCGCACGGACAGCGCGCGCATCGTGCCCGAACCGCCAAACCCGGATCGCGGCGGCTGCCCTCGCGCGAATTCCCGCCTCCGGCACGGTTTTCTCGACGCCGGCACGACGGTTCAGGCGATTGCGCGGCTGCTGCTCGCCGTCAGCCGTTCACCAAACTCACCGTCGTGACCAACAGCCTGCCGCTCCGACGATTCTTGGCGGCGCCCCCGGCCTCGAGCTGCACGTCCTCGGCGGATGTTCCTCCATCGGCAGGCGATCCTGCTCGGCCCGCAATCGACGCGGAGCTCACCGCCTGGAAGTTCGATGCGGCGTTCCTCGGCGGCGAGGGGATGATGCACAGGGAGTCACCAACTCGCACGCCAACATCGCCGCCTTCCAGCAGCGGTGCTGCGGCGCGCGGCGAAAGCCTACTTTTGCCTTGATGCCACCAGCTCGGCCGCGCCACCCCGCATCGCGTGGTCGGCTGGGATCGGTCGATTACCTGATCACCGACGCCACCCCCGCGGCACTGGCCAGGGCGTCGATCGCCTCCCGCTTACCCACTACATTCCCGCGAAGTA

SEQ ID NO: 1202 - protein, 257 aa, Opitutus terrae
MRVPLHIVEKRREQLRQLIRTDGFLPIAEICRRLEVSEATARRDLVAVASGHITRTRGGALADYNTTFASHGQRAHRARTAKTRIAAAALARIPASGTVFLDAGTTVQAIARLLLGRQPFTKLTVVTNSLPLATILGGAPGLELHVLGMFLHRQAILLGPQSTRTLTAWKFDAAFLGGEGMDAQGVTNSHANIAAFQQAVLRRAAKAYFCLDATKLGRATPHRVVGWDRSIHLITDATPAALARASILPLTHYIPAK

SEQ ID NO: 1203 - DNA, 672 bp, Opitutus terrae
atgtcatccacaccgcccgcccccgctgccccccaccgtgccgaaatcggcacgtcgtgcggcggctcctttaccagcggctcggtcagccgctgccagttccgcccgggcgccgcgaccgctgatcgtcaacgtcagcgcccggcatgccatctcaccccgcaggccgtcgaaacgcttttcggccgcggtcaccgctccagccgaagaaatggctctatcaggccggccagttcgccgccgagagaccgtcacgctcatcggcccgcgcagccgggtcatctccaatctccgatcctgggcccctgccgcgatctgaaccaggtcgagctcgccaataccgtgcgatctcgctcggtttcgaggcgccggtgcgcgcgtccggcgacatcaaggcactcccggctgcatgctgatgggcccggtcggtttcctggagctccgcagggcgtgatccgcgccgcgccgcacgtgcacatgcaccccgacgcgccgcgttttacggcgtgaagcctggcagtttcatccacctccgcgtcgcggcccatgcgcgatgacgttcgaccggatgctcgtgcgcgtttcgccgatttcaaactcgaggtgcacatcgacaccgatgagggcaacgcctgcgtctcacccccggcacgccgtgcgagctcgttccct

SEQ ID NO: 1204 - protein, 228 aa, Opitutus terrae
MSSTPPAPAAPHRAEIEHVVRRLLYQRLGQPLPRSARAPRPLIVNVSARHCHLTPQAVETLFGRGHQLQPKKWLYQAGQFAAEETVTLIGPRSRVISNLRILGPCRDLNQVELANTDAISLGFEAPVRASGDIKGTPGCMLMGPVGFLELPQGVIRAAPHVHMHPDDAAFYGVKPGSFIHLRVGGPCAMTFDRMLVRVSPDFKLEVHIDTDEGNACGLTPGTPCELVP

SEQ ID NO: 1205 - DNA, 266 bp, Opitutus terrae
atgaatgaatccctcggcatgatcgaaaccaagggctacgttggctccacgaagccagcgacgccatggtcaaagcggccggcgtctcgctcgcccgcaggtccagatcggtggcggcctcgtcaccatcatcgtcaaaggcgacgtggcagcgtgaaagccgccgtcgaagccggcgccgatgccgccaagcgcgcggtgaactcgtctgcgcccacgtcatcgcccgcccgcacggcgagctgtgaaacaattcggcttggcct

SEQ ID NO: 1206 - protein, 89 aa, Opitutus terrae
MNESLGMIETKGYVGSIEASDAMVKAAGVSLARQVQIGGGLVTIIVKGDVGSVKAAVEAGADAAKRVGELVCAHVIARPHGELLKQFGL

SEQ ID NO: 1207 - DNA, 272 bp, Opitutus terrae
atggcacaagaagctctcggcatgattgaaaccaaaggcctctgcgctccctcgaggcctccgacgccgccctcaaggcggccaacgttacgatgaccgctacgaagcgattggctcgggccacgtcgccggatttttccgcggcgagtcgcgtccctcaaagccgccgtcgatgccggcgccgaagccgccaagccgtcggcgaggtcatcgcggtccaggtgattccgcggccgcacgacgagtcagcaacctcggcaagtggctcgcgt

SEQ ID NO: 1208 - protein, 91 aa, Opitutus terrae
MAQEALGMIETKGLCALLEASDAALKAANVTMTGYEAIGSGHVAGFFRGDVASLKAAVDAGAEAAKRVGEVIAVQVIPRPHDELSNLGKWL

SEQ ID NO: 1209 - DNA, 1266 bp, Opitutus terrae
ttgaaactcctcgtcgccaatctcggctccacgtcgttcaaataccggcgttttcgctcaacggcgaacaggcggcattgctcgcacgcggtggcagcaacgcgtcacggactacggcgcggcgatcgatcacgccctgggcgagctgctcggggcggccacgtgcagcgcggggaggaattggacggcgttgggtcaagaccgtcttcggcggcgaactcaccggctgtgtactcgccgacgaggcgtcgagcaggcgctgctcgacaccgccgatctcgcaccggcgcacaaccgccgtatgccgcgggactgaaactcttccgcgagcggctgccgtcgggccgcgcgtggcgctgttcgagaccgcgttttatcagtgggtgccggatatgcgcgccgctacgcggtgcccgaagcctggcacgcggccggcattcgcgcttcggttttcacggcgccagtcacaagttcgtcgcggagcgctccgcgagctgctcgctcgcgatgaagtcgccgccgtcgcgcgccggctttactcgacggtccccgtccgatcgccggcgcgccgctgcgcgtgatttcctgcatctcggcggctcgagctccgtcaccgcgatcgtcgacggcgtcgcggggggacgagcatgggcctgagcccgcaatccggactggtgcaaagcacggcgtgggcgatctcgattccgccgcgctcggctgcgccatgcgccggctcagctcgcgcccgccgacgccgaacggcagttggtaaaagacagcggacgctcgggctctccggcgtgagcggcgacctgcgcgacattcgcgccgctcggatcagggcaacgcccgagcccagctcgcgatcgacgtcttcatccaagcatccgccactggatcggcgcgttctggttcgaactcggcggctgcgcgcgctcgtgttcaccggtggcatcggagaaaacaacccctggctgcgcaggccgtctgcaccgggctgtgcgatctcggtctcttcctcgaccccgagccaacgcgtcgtcaccgccggagttcaacctcgcggatccggattcgccacgcgcgtgctcgtcattccggcgaacgaagaactggtcgtcgcccgcaagccgcccggctgatcgccgcgcgagcaattccggcagggccgccgctgccgccgagccgcgactgcccgtggacggcaaccctccgactcttgacttcaactctcaactcctcgttcaactctcagctctagactct

SEQ ID NO: 1210 - protein, 429 aa, Opitutus terrae
MKLLVANLGSTSFKYRLFSLNGEQAALLARGGSERVTDYGAAIDHALGELARGGHVQRGEELDGVGFKTVFGGELTGCVLADERVEQALLDTADLAPAHNPPYAAGLKLFRERLPSVPRVALFETAFYQWVPDYARRYAVPEAWHAAGIRRFGFHGASHKFVAERSAELLARDEVAAVARRLYLDGPRPIAGAPLRVISHLGGSSSVTAIVDGVAVGTSMGLSPQSGLVQSTRVGDLDSAALGCAMRRLQLAPADAERQLVKDSGLLGLSGVSGDLRDIRAAADQGNARAQLAIDVFIHSIRHWIGAFWFELGGCDALVFTGGIGENNPWLREAVCTGLCDLGLFLDPDANASSPPEFNLADPDSRTRVLVIPANEELVVAREAARLIAARAIPAGPPLAAEPRLPVDGNPPTLDSQLSTPRSTLSSRL

SEQ ID NO: 1211 - protein, 287 aa, Opitutus terrae
ATGTCCCAACCCGCCCTCGGTCTCCTCGAAACGCGCGGTCTCACGGCGCCGTCGCCGGTACCGACGCCATGCTCAAGTCTGCCAACGTCACGCTCGTCGTCCGATGAAACAGGTCGGCAACGCGCTCGTGACCGCGGTTGTCACCGGGATGTCGCCGCCGTCAAGGCCGCGACCGAAGCCGGCGCCGCCGCCGCCCCCAATACGGCGAGGTCGTCACCGTGCAGGTGATCGCCCGGCCGCACGACACATCGCCAGCGTTCTCCCGAAAGCGCCCGCTGCCAAAAAGT

SEQ ID NO: 1212 - protein, 96 aa, Opitutus terrae
MSQPALGLLETRGLTALVAGTDAMLKSANVTLVGPMKQVGNALVTAVVTDVAAVKAATEAGAAAARQYGEVVTVQVIARPHDDIASVLPKAPAAKK

SEQ ID NO: 1213 - DNA, 294 bp, Opitutus terrae
atgttcctcgcccgcgtcatcggctccgtggtctccaccaaaaaggacggaccatgcgcggccgaaaactcctgctccttcgtccgatgctgatcgacaagcgaatcccgccgcgttcaaacccggcgcgaacaccgtggtcgcggtgatgccgtcggtgccggcactggcgatctcgtgctgttctgccaaggtactccgcccgccaggccaccggcatgaagacgctgccgatcgacgccgcctcgtcggccacgtcgacaccgtcgaggtcatgggcaagcggatcgcgta

SEQ ID NO: 1214 - protein, 98 aa, Opitutus terrae
MFLARVIGSVVSTKKDETMRGRKLLLLRPMLIDEANPAAFKPGANTVVAVDAVGAGTGDLVLFCQGSSARQATGMKTLPIDAAVVGHVDTVEVMGKRI

SEQ ID NO: 1215 - DNA, 1470 bp, Opitutus terrae
atgccttccctcccgatcgacgaaactctcgtccgcagcgtcgttgaagagttgtccgcgcgttcgcgcgcaacggcggcacgatcggaacggcttcccttcgaccgccgccgctccgtcccgcgctggcgccggtcccgcgctcgttcgactcgcaactcgggtccgcgttacggcgtgtttcaggacgttccctcgccgttgctgccgcccaggccgcctacctgcagctctgcgtgaaagggtcgccgcgcgcgccaaggtcgtcgagatcgtcaaagccctcgcgacgcaaacgccgaggagtggggcaagttcgagttcgccgagaccaagatcggccgctcgaccacaagatcgaaaagctccagatcgtgaaactcgtgcccggctcgagtggctgcaccccgacgcgcgcagcggcgatcacggcatcacgctgaggaatacacgccgtttggcgtcatcgccgcgatcctgccgatgacgcttcgatccccacgctgtccggcaacatcatcaacatcgtcgccgccggcacgcggtgatcttcaacccgcacccgggtggcgcgcgctcggccgcgctgcggtccgcgcctacaacgaggcgatcactgccgccaccggcatcgagatctcgtctgcacgatcgagcagccgaccctcgagtcgttcgacgcgcttgccaggcgcccgaggtccgcgtgctctgcgtcaccggcggcccggccgtgtcgccgccgcgatgaagtccggcaaacgcgcgatctgcgccggcccggcaatccgcccgtgctggtcgacgacaccgtcaatttcgacaaggctgcggcgatatcattcagggcgccgcctacgacaacaacctgctctgcgtcgggaaaaagaggtgttcgtcctcgacaaggtcgcggacaagttgatctccgcttcgcgcgcaacggcgcccggcagctcaacagctcgcagctcgaacggtcaccgccgccgccttcaccaacaagcctgacgccggcggctgctcgcacccgtgctcaaccgcagcttcgtcggcgtcgacgccgccgtcctcgcgcgcacgccggcaccgaggtccccgccaacacgccgctgctcttcgccgaaccgacgcgaatcacgccttcgtgattgaggagcagatgatgccgatgatccgatcgtccgcgtgaagtcggtcgaggaaggcgtcgccgccgcagtgaagccgagcacggctacaagcactccgcgatcatccactcgcttaacgttatcacatgacgatgatggcccgcgcgctcgacacgaccgtgttcatcaaaacggcccgtgcgtcgccggcctcggcctcggcggcgaaggctatctcactactcgatcgccaccaccaccggcgagggcatcaccacgccacgcacctcacccgcacgcgccgctgcgtgatggtcgacaacctccggatctacta

SEQ ID NO: 1216 - protein, 498 aa, Opitutus terrae
MPSLPIDETLVRSVVEEVVRAFARNGGTIGTASASTAAAPSRAGAGPALVSTRNSGPRYGVFQDVPSAVAAAQAAYLQLCVKGVAARAKVVEIVKALATQNAEEWGKFEFAETKIGRLDHKIEKLQIVKLVPGVEWLHPDARSGDHGITLEEYTPFGVIAAILPMTHSIPTLSGNIINIVAAGNAVIFNPHPGGARSAALAVRAYNEAITAATGIENLVCTIEQPTLESFDALCQAPEVRVLCVTGGPAVVAAAMKSGKRAICAGPGNPPVLVDDTVNFDKAARDIIQGAAYDNNLLCVEKEVFVLDKVADKLISAFARNGARQLNSSQLERLTAAAFTNKPDAGGCSHPVLNRSFVGVDAAVLARHAGTEVPANTPLLFAETDANHAFVIEEQMMPMIPIVRVKSVEEGVAAAVKAEHGYKHSAIIHSLNVDHMTMMARALDTTVFIKNGPCVAGLGLGGEGYLSYSIATTTGEGITTPRTFTRTRRCVMVDNLRIY

SEQ ID NO: 1217 - DNA, 261 bp, Opitutus terrae
atgaactacgcccgtattgacggcacgatcgtcgcctccgcctgccatccagcatgggcggcacgcgcacggtcatctgtcagccgatcgatgcggaagccgggacgaaggagcaccgattctcgcggtcgatccgctcggcgccggttgcacgaggtcgtgatcctctcgaccgacggctcggccacgcgcgagtcgtgcgcgatccgaaatccccgctccgcaacctgatcatcgggatcgtcatccgacggcaacgta

SEQ ID NO: 1218 - protein, 85 aa, Opitutus terrae
MNYARIDGTIVASACHRSMGGTRTVICQPIDAEGRDEGAPILAVDPLGALHEVVILSTDGSATREFVRDPKSPLRNLIIGIVDPT

SEQ ID NO: 1219 - DNA, 372 bp, Opitutus terrae
atgcgcctcggcatcgtcatcggtcgcgtcacgctcacgcaaaaggagccgtctacaacggcggccgtttgctgatcgtgcagccatggacccgcgccagttcgccgctgcgtccgccgatcgttctggagacgcgacgccctcgtccgtcccatcgggtccaacatagcccttccgctgccgaagggttccagcgcatcgtctatgacgaactcggcgccggcatcggcagcatcatcggcttcccgaaggcgccgaagcgaccatgcccttcaccggcgatgcgcccgtcgagcctactgcgcctgcatcgtcgatcaggtggattatcaaccgccagccgcgccaacccagtcgatagggcggctctgt

SEQ ID NO: 1220 - protein, 126 aa, Opitutus terrae
MRLGIVIGRVTLTQKEPVYNGGRLLIVQPWTRAEFAAASADRSGDATPSSRPIGSNIALPLPKGSSVIVYDELGAGIGSIIGFTEGAEATMPFTGDAPVDAYCACIVDQVDYQPPAAANPVDRAAL

SEQ ID NO: 1221 - DNA, 1173 bp, Opitutus terrae
atgccacaagttctcaccgctcgcgaagtccaggacctcgtccgcgccggcagcccgtgccggaaggcgcgctgctgacgccgtccgcccgcgacttctcgaagatcacaaacgcaccgcccgcggctcgtcgcgtcccgctcctgtgccgggttcgtcgaaccccgctcggcaccctccaccacgggctcatcgagccggccacagcagcactcaccgtggttccggccgcaggtctctcaacctcaactctcaactctcaacttcctcggccccggccacgcccgactacgatttcgctggacgcccggctccgatccaaagacgcccgccgagatcgagcgttcttccgctccgagccgatcgaaatcctcaagcgcaggatctgcgacttggccgtcggctctggctgaaggactacaccgacggcaacggcggcaaatcaccatccgcgtcggtgacaacctcgcgctctgcacgcccacgctcactgcaagggcttcatgacgcccgaggacatgtgcctcgtcgacctcgacgcaaccagctcgccggcacgcgcgtccgcacgagcgaagcgaagacgcattcgggatcatgaaacggcagcccgccgcgaaggcctgcgtgcacgcgccccgccacacgccaccgcgttcgcgatctccaacgcgaagattccttcgccctcattccggaagcggaggtgttccttggccggatcggcatcgcccatacgaaacgcccggcacgcccgccaatgccgaggaagtcggccgcgtcgcgtcgatcaccaggcggtgctcatgcagaatcacggcgtgatcgtgtgggcaaggacgtcgaggacgcctactggaaaatggagaacatcgacgcctatgccgcacgatcgcgatcgccgcggggctcggcacaggcctgcatcgttcggtcccgacaagctcaaggatctcatcgccctccgccagaagctcggctgccggatccgcgcgcgaacttaaaggaagcggaactctgcgacgacaaagcgagtttcgccccgccgtcgtctgccagactcccgccggctcgctcgcgcgcccgcgggcaacgaacccgccgccaatcccgaagtcgaagcgctctgcagagactcaccgaggagatcctgcgccagctgcagaacaagta

SEQ ID NO: 1222 - protein, 398 aa, Opitutus terrae
MPQVLTAREVQDLVRAGQPVPEGALLTPSARDFLEDHKRTARGSSRPAPVAGFVEPRSAPSTTGSSRPATAALTVVPAAGLSTLNSQLSTSSAPATPDYEFRWTPGSDPKTPAEIERFFRSEPIEILKRRICDIGRRLWLKDYTDGNGGNITIRVGDNLALCTPTLICKGFMTPEDMCLVDLDGNQLAGTRVRTSEAKTHFGIMKRQPAAKACVHAHPPHATAFAISNAKIPSALIPEAEVFLGRIGIAQYETPGTPANAEEVGRVGVDHQAVLMQNHGVIVWGKDVEDAYWKMENIDAYCRTIAIAAGLGTGLHRFGPDKLKDLIALRQKLGMPDPRANLKEAELCDDNSEFRPAVVCQTPAGSLAAPAGNEPAANPEVEALVQRLTEEILRQLQNK

SEQ ID NO: 1223 - DNA, 911 bp, Opitutus terrae
atgaaactcaccatcatcggcggcggcggccgcgtcggatccaacgcggattcgcgctgcagtgcgccggcattgtttccgaaatccaattgctcgatccaatgccgagctcgccgccggcgaggcgctcgatcttctgcacggctcgcttcggtcgccgaccagcggatctatgccggtgactacgcgcgtgccgcgacagcgatatgttcgtggtcaccgccggactgcggcgcaaacccgacagtcacggctggacctgatcaaccgcaacgtcgcgctgttcgacagcatctcgcgtcgatcaagcaagccggcctgcgcaaggacgcgctcgtcttcgggtctccaatccggtcgacacgctgacgcagctcgcggtcgcgcgactggcttgccgtcgcagcaggtgctcgggctcggcacgatgctcgacaccgccgcttccgctcgcttatcgccgagcagctgaaactcgcgccgacgcagggaaggcgctgatcctcggtgaacacggtgacaccatggtgccaatctggcgagcgccaccgccgccggactcccgctggaaaagatgccgggcgttacccgagctttcagcagcagattttcgaacgcaccaagaccagcggcgccgagtcattcgtcgcaagggcggcgccggctgggccgtcgcgatcaccatcccgaggtcgtgcacgcgatcgcgcaggacaagcgccagctgctccccgttcgtcgctgcagcaaggctgctatggattgcgcgacgttgccctcagtggccgacggtggtcggtcgtggcggcgtgatctcgcacgtcgagattccgtctggccgaaggagcagcagggcctgcaagccagcgcccgcgcattgcagaaatctggtcgaaggtgaggccacggta

SEQ ID NO: 1224 - protein, 307 aa, Opitutus terrae
MKLTIIGGGGRVGSNAAFALQCAGIVSEIQLLDANAELAAGEALDLLHGSASVADQRIYAGDYARAADSDMFVVTAGLRRKPDESRLDLINRNVALFDSILASIKQAGLRKDALVFVVSNPVDTLTQLAVARLGLPSQQVLGLGTMLDTRFRSLIAEQLKLAPTQVKALILGEHGDTMVPIWSSATAAGLPLEKMPGVPSFQQQIFERTKTSGAEVIRRKGGAGWAVAITIAEVVHAIAQDKRQLLPVSSLQQGCYGLRDVALSVPTVVGRGGVISHVEIPLWPKEQQGLQASARALQEIWSKVRPR

SEQ ID NO: 1225 - DNA, 1419 bp, Opitutus terrae
atgccccgcacgcccaccactcccctgcactgcgccgccgtcgatcttgtgccactagcggccgcgtgatcgtcggcacctgggccaggaacaaactcggctcacggaggttcaccggtttcccaacacgttccaatcgcttggcgccacgactactggaaccttcccgggctctgggccgaggtgcagacgggccccgccaggccgccgcgcaattcaagcccatcgcctccgtcggcgtggatcgtggggcgtcgactacgtgctcgtcaacgacggggggcggctcgttttccggcgcacgcctatcgcgacgcgcgcacgcagcccgggctgaaacggccggcaacacccgcgccgcgctcgcgcgagtttacgccgccaccggcatccgaacgttttctacaactccagcctgcagctccaggaggtggtcgcgaatgcgccgcgatcgaggacctcgccacgcgctgcctcttcctcccggacttttcaattatctcctctccggtcggatggagaacgagctcacgatcgcggcaccacccagcttctcgacgtccattcgacgaactggtcccggcaggcctcgattacttccggattccggcgcagtggttttcgaaaccgatcctcgcggcacgaaactaggccaggtcacttcgctcgccgagttgaaagccacgaggtcatcgccgtccccagccacgacaccgccgccgcctacgacgctatcctgccagccccgacggcaccgatctcttcctcagctctggtacgtggtgctcgtcggcttcgaaagcgaccaacccctccttggcgcggaggcgctgaaaagcgcattgccaacgagcgcacgggccgtggcggctatcgtccgctacgaacgtcatcgggctgtggctgctcgaacggacgctcgccgccttcgcaagcgtccgaagagcggcgccgagttcgacgcgctcgctgccgccgcgcgaaacttcccgcgccgaaacagctgctcgacgtcagcgatctggtcttgcgaatccgtcctcgatgcgcgctgcgatcgacgcccagctgaaaaaaccggcgcgaaaccgccgcgcgatctacccggctacgcgcggctgatctgcattcgctgggccgcggtcacgccgacgcgatgcgcgcgttcgaacggctgccggccgcacgttcaagcggatcctcatcgtcggaggcggttcgaaaaccagctgctctgtcaggccaccgccgatgccgccggcgtgccggtggtgcgttctccctcgagggcaccgccgtcggcaacatcgccagccagctcatgcgctgcgcgcggtgaaagacctcgccaccttccgcgcgcatctcgcgcatcgatcaagcagacaacctaccaacccaagtctagagcccagagct

SEQ ID NO: 1226 - protein, 480 aa, Opitutus terrae
MPRTPTTPLHCAAVDLGATSGRVIVGTWARNKLRLTEVHRFPNTFQSLGHDYWNLPGLWAEVQTGLRQAAAQFKPIASVGVDTWGVDYVLVNDGGRLVFPAHAYRDARTQPGLKRLGNTRAALARVYAATGIPNVFYNSSLQLQEVVANCAAIEDLATRCLFLPDYFNYLLSGRMENELTIASTTQLLDVHSTNWSRQLDYFRIPAQWFSKPILAGTKLGQVTSLAELKATQVIAVPSHDTAAAYDAMPASPDGTDLFLSSGTWSLVGFESDQPLLGAEALEKRIANERTGRGGYRPLTNVIGLWLLERTLAAFDKRPKSGAEFDALAAAAAKLPAPKQLLDVSDLVFANPSSMRAAIDAQLKKRGAKPPRDLPGYARLICDSLGRGHADAMRAFERLAGRTFKRILIVGGGSKNQLLCQATADAAGVPVVSFSLEGTAVGNIASQLIALRAVKDLATFRAHLAQSIKQTTYQPKSRAQS

SEQ ID NO: 1227 - DNA, 1246 bp, Opitutus terrae
atgtcctccgccaaagctatttccgccgcctacaaactcgcccgagacgctatgccgaccttggcatcgacaccgaagccgccatcaagcgcgcgctcctctcccgatctcgctccattgctggcaggcggacgacgtgcgcggactgagacgccgaagccgggactcgattctggcgggatcatggcgaccggcgttatccgggccgggcgcgcaatggcgacgagatgcgcgccgatctcgactcgtgttgaacctccttccgggcaaacagcggctcaacctgcacgcgtttacgccgagaccggcgccgcccacgtcgatcgcgatgagatcgagccggacatttcgcccgctggctcgcgtgggcaaattcacgccgcgtggggctcacttcaatccgacctacttcgcgcacccgcacgccacctcgggcttcacctttcgcatccggacaaagcgatccgcaagttctggatcaaccacgcgaggcctcgcgccggatcgcgcagcatttcgccaaaaatctcggcactcccgcgtgaacaaccattgggtgccggatggcgccaaggatgcgccggccgacgctgggcgccgcgcgcacgcctcgtcgaatcctacgatgccatttttgcgacaaatcgatcaaccggaagctctgcgtcgatgccgtcgaaggaaaatcttcgggctcggcagtgaggattacgtcgtcggctcgcaggaattttatcgtcctacgcgcagtcacgcgatctcgtgctctgcctcgatctcgggcttatcatccgaccgagtcggtcgcggacaaggtttccgcgctgatgcagtccacgatcggattctcctgcacacgtcgcggccgattcgctgggacaggatcacgtcgtcatcctcgacgactccacgcgcaatctcttcctcgagacgcgcgcggcaacgcgtgggatcgcgtcttcgtcgcgctggatttcttcatgcgtcgatcaaccggatcgccgcgtacgtgatcggcgcgcgcgccaccggcaggcgattttgctcgggctgctcgatccctcgcagcagctgcgcgggccgaaaccgccggccggggtcatgagcggctcgcgctgatggagcagcgaaagcgctgccgtggggcgccgtgtgggacgaactctgcgtgcgcgagacgtgcccgcccgcgccgattggctcgccgccgtcgcgcgctatgaacggacgtgctggcgaagcggta

SEQ ID NO: 1228 - protein, 421 aa, Opitutus terrae
MSSAKAISAAYKLARDAYADLGIDTEAAIKRALSLPISLHCWQADDVRGLETPKPGLDSGGIMATGGYPGRARNGDEMRADLDLVLNLLPGKQRLNLHAFYAETGAAHVDRDEIEPEHFARWLAWANSRRVGLDFNPTYFAHPHATSGFLSHPDKAIRKFWINHAKASRRIAQHFAKNLGTPCVNNHWVPDGAKDAPADRWAPRARLVESYDAIFADKSINRKLCVDAVEGKLFGLGSEDYVVGSQEFYSSYAQSRDLVLCLDLGHYHPTESVADKVSALMQFHDRILLHTSRPIRWDSDHVVILDDSTRNLFLEIARGNAWDRVFVALDFFDASINRIAAYVIGARARQAILLGLLDPSQQLREAETAGRGHERLALMEQAKALPWGAVWDELCVRDDVPARADWLAAVARYERDVLAKR

SEQ ID NO: 1229 - DNA, 1298 bp, Opitutus terrae
atgaatctggttgagcaggtccggctcgcgggcgtcgtcggcgcaggcgcggcggatttccggcgcacatcaaactcgccggcaaggcagacgtggtctcgccaacggcgccgaatgcgagccgcttctgcacaaggacgcggcggtatggagcgcaatgcgcgggatctggtgactgggctgcagctggcgatggggcggtcggtgcgacgactgggatcgttggcctgaaggcgaagaaccagacgcgcaggaggcggtcacagaggcgtgccgcggcacgacgattcgcatcacctgctgggcgattactacccggcgggcgatgaatacgatcttgtcttacgaccaccggtcgcttgatcccaccggcgggcatcccgcttaacgtcgcgcagtggtcagcaacgtcgaaaccctcgtcaacatcgccgcggccgcgaaggccgaccggtcacgcacaagacgctgacgatcgccggcgcggtggggcgcccgccacgctgacagtgccgctgggcactacgctgcgcgcgtgctcgacgcggccggcgggccgacggtgctcgatcccgtgctctgcattgggggatgatgatgggcgagaccacgaccgatctggatcggccggtgacgagaccacgggcggcgtgatcgtgctcccgcgcagccatcgcatcatccaggaaagctgaagcccgcgacgttgcagcacgccatcggcaagtcggcctggaccagtgccgttactgcaccgaatactgtccgcgcttcctgctcggcttgcggtggagccgcaccaggtgatgcgttcgctcgcgttcacggcgaccgcgccgcgcactggaacgactgggccgcgttgtgctgcgcgtgcgggcttgcacgctctacgcgtgtccggaggagcttttccccaaggaggcctgtgtcaggccaaggtcgaaatgcggcgcgcaaatgtaaaatggtccggcccgcgacggtgaagccacatccgatgcgcgaggggcgccgcgtcccaatcaaacgctgatgcgcaagctgcatatttccgactacgagcatccggcgccgtgcgcgcgacgcagatttccccgagccggctggtgatcgcgttgaagcaagcgccggatcgccgtgccagccgtgcgtgcgcgcgggcgacgccgtggcgccggacagatgctcggcaacgttcctgagaaagcgttgggagcggcgaccacgcgccactcaccggaacggtgacggagatcacgccgaatcacatcttctccaggtctccccaaaaccat

SEQ ID NO: 1230 - protein, 437 aa, Opitutus terrae
MNLVEQVRLAGVVGAGGGGFPAHIKLAGKADVVIANGAECEPLLHKDAAVMERNARDLVTGLQLAMEAVGATTGIVGLKAKNQHAQEAVTEACRGTTIRIHLLGDYYPAGDEYDLVYTTTGRLIPPAGIPLNVGAVVSNVETLVNIAAAEGRPVTHKTLTIAGAVAAPATLTVPLGTTLRACLDAAGGPTVLDPVLCIGMMMGETTTDLDRPVTKTTGGVIVLPRSHRIIQRKLKPATLQHAIGKSADQCRYCTEYCPRFLLGYAVEPHQVMRSLAFTATGAAHWNDWAALCCACGLCTLYACPEELFPKEACDQAKVEMRRANVKWSGPATVKPHPMREGRRVPIKTLMRKLHISDYEHPAPWRATQISPSRLVIALKQSAGSPCQPCVRAGDAVAGQMLGNVPEKALGAAIHAPLTGTVTEITPNHILLQVSPKP

SEQ ID NO: 1231 - DNA, 542 bp, Opitutus terrae
atgagcgcagaaaaatccgtcgggttgatcgaactctcgagtgtggccgcggctatctcgtggccgacacggtgctgaaagcgggcaacgtgaagctcacctgtcgcgcagcatctgctcgggcaagtacatggtggtgatcgccgggatgccgcaggcgtggagagcgcgatccgcgccggcgcggaggcggcgggggttgcctgattgacagcttcgtgattgcgcagattcaccccgacgtgtcacggcgctgggacgcacgcaggtcgcgccgccgaatggcgcgctgggatcgtggaatctttcaacgtcgccacattgctgcgtgcggccgacgccaggcgaagagctcaaatgtcacgctgctcgaagtgcggctggcgatggcgtgggcgggaaggcgtttgtcacgctgaccggggacgtcgcctcggtgcagccgccgtgaatgtcggtcgtgcggtcgtcggtgaagcgggaatgctgggaacgcggtggtgatctcgcggccacatccggatatcttgcgggagatgtgt

SEQ ID NO: 1232 - protein, 182 aa, Opitutus terrae
MSAEKSVGLIELSSVAAGYLVADTVLKAGNVKLYLSRSICSGKYMVVIADAAGVESAIRAGAEAAEGCLIDSFVIAQIHPDVLTALGRTQVAPPNGALIVESFNVATLLRAADAMAKSSNVTLLEVRLAMALGGKAFVTLTGDVASVQAAVNVGRAVVGEAGMLVNAVVISRPHPDILREMV

SEQ ID NO: 1233 - DNA, 1611 bp, Chloroherpeton thalassium ATCC 35110
ttggaacacgaagggatttttaaacatatctcggattcttcggagggaggatcaatgttcgtaaatataagcccgatgcggcaagtgacaaggccaaacggcagatttcaaacttgacaattttccagagccctcgccttatgccatgcaaatgcgcaaaatggaatagaaaacgaacttaatgcggttatcaccgaacgctcggggcggttaaagaaacgcttcaagccagaaccgcagcttatgctggtcgagcctttcaaagaagacattttatattgcttcgtatgtaacgattccccaaattttaccgacgaaaagtggctttcctttgccggcgacgactcactcaaacctttctggcacgaaacgcgcagctttataaagacatcgtccatccgacgaggtcaaaatcattcgctattacaaagcctcgaacgcattcgttcgtttatcggtgttccggtttttcatggcgattttgtgtatgcattttatttgtcgatagcaccgttcgcgaagcgttcagccacgacgattcaagctgctcaatcggtttgccaatatttgctccgcgcttattgaaaatacgccatcaagtctacgcacatggaatcgcttcgatttgtgaagcccggatttcatttatgcacaacttgcaattgactgctgaaattgaaaaagcacggaaatcttttcaaaatcgatcgacgagattttggaattcgatcacctaccatttcgcttgtcaattcaaactcggaattaatcgtcaaaaaagttgtagcaaagtcgaggatagctatgtggagacaggcagcaaaatagatttaaaaattcggcggtaggcatttccgtgatgcaaggccaagacggcacgatgatgatctttccacgctcaacggctttgcaagatttttccccgacgaacttgcaaaaaaacaaatgaggcaaaaggctccatgctgattgtccctatcaatatcaagattcgtatagcggcgtggttacgctggaaacatcgcaaagaactattttgggaaagaaaattttgcgaaggttcgcttttatgtagaagactttcattctttttacacaccaaatttcttgaagagcaacttaaagctttaccccactggacgaggagacgggaattttaagccgtcgaacctttgtggtcgtgtgcgacatgagtttaatcgcgccaaccgcgaacgaaccaactggttttaatgcttattgaatttgacgatatagaaggccttttgcaccgtatggtgaaaaatcggtgagcattctgatgcgttcgaccgcgcgattgctgcttccggcatccgcaattatgatcttattggccgcttcgacacatataatttgcggtttgcctgatcaatatcaccgaaattaatgcgcgttattggcagataagattagagagcagatcttaaacacgccttgcgaaactgaagagcctttcactcaatcttggcatctgttagcattggccttgcgaaactgagcatgagaaaacagacattgacatgctctttgaaggtgcgtcaaaggcataaatcatgcgcttaaaaccggcaactcggtaaaagtatttta

SEQ ID NO: 1234 - protein, 545 aa, Chloroherpeton thalassium ATCC 35110
MEHEGIFKHISDSSEGVINVRKYKPDAASDKAKTADFKLDNFPEPSPYAIANAQNGIENELNAVITETLGAVKETLQARTAAYCWSSLSKKTFYIASYVDSPNFTDEKWLSFAGDVLTQTFLARNAQLYKDISPSDEVKIIRYYKASNIRSFIGVPVFHGDFVYGILFVDSTVREAFSHDDVKLLNRFANICSALIENYAIKSTHMESLRFVKPAISFMHNLQLTAEIEKATEIFSKSIDEILEFDHLTISLVNSNSELIVKKVVSKVEDSYVETGSKIDLKNSAVGISVMQGQDGTIDDLSTLNGFARFFPDEPCKKTNEAKGSMLIVPIKYQDSYSGVVTLETSQRNYFGKENFAKVRFYVEALSFFLHTKFLEEQLKAITPLDEETGILSRRTFVGRVRHEFNRANRERTNLVLMLIEFDDIEGLLHRYGEKSVSILMRSTARLLASGIRNYDLIGRFDTYKFAVCLINITEINARYWADKIREQILNTPCETEDAFHSILASVSIGLAKLKHEKTDIDMLFEGASKALNHALKTGNSVKVF

SEQ ID NO: 1235 - DNA, 263 bp, Chloroherpeton thalassium ATCC 35110
atgactttaggcaaagtaattggaacgctgtgggcaacccgaaaagatgaggccttcgtggcttgaagcttcaaattgttcggcatcttgaattggatataaaccaaaggatagttttgtggtggcggtcgactcggttggcgcagggtgggggaaattgttttgcttgcctccggcagttcggcacgacaaacgggatcacacaaaataagcctgttgatgcggtgattatggcgattgtagataagtggatattgcagatt

SEQ ID NO: 1236 - protein, 88 aa, Chloroherpeton thalassium ATCC 35110
MTLGKVIGTLWATRKDEGLRGLKLQIVRHLELDYKPKDSFVVAVDSVGAVGEIVLLASGSSARQTEITQNKPVDAVIMAIVDKVDIAD

SEQ ID NO: 1237 - DNA, 288 bp, Chloroherpeton thalassium ATCC 35110
atgtttttaggcaaaatacttggcacggtttgggcaacccaaaaagaccgtcacttgtgggggaaaaaatgcaagtggttcagccgttaagtgttcatataaacctgtggggcgtccgttgattgcattggatagcattggcgcagggtgggcgaaacggttttttatgtcacttcttccgaagcaaccattcccataaagaacaaaaaaaagttaaagccgtcccaactgatgctaccattgtggcattgtggataggattgacgtttctaattatcaggaattata

SEQ ID NO: 1238 - protein, 96 aa, Chloroherpeton thalassium ATCC 35110
MFLGKILGTVWATQKDPSLVGEKMQVVQPLSVHHKPVGRPLIALDSIGAVGETVFYVTSSEATIPIKEQKKVKAVPTDATIVGIVDRIDVSNYQEL

SEQ ID NO: 1239 - DNA, 882 bp, Chloroherpeton thalassium ATCC 35110
atgcgccaactgaaaatcagtaagcaaatcaccaatcgcgaaagtcaattcttgacagatatcttcaagaaatcggaaagtttgatttgctcactgcgaggaagaaattgagctgacacgacagataaaaaaaggtgatgggcaaccattgactcgaaagagtatcgagaagctcgccgtgcgttagaaaagctgacaaagcgaacttgcgatttgtggtttcggttgcaaagcaatatcaaaacaagggctttcgcttggcgatttgattaacgaaggcaatttgggcttgataaagccgccaagcggtttgatgaaacccgcggattcaagtttatttctttgcggtgtggtggattcgccagtcgattttgcaagcgcttgctgagcaacgcgcattgtgcgcctgccgctcaaccgcgtcgggacgctcaataaaatggcaaagcgttcagccagctcgagcaagaatacgaacgcgatccgagcaagaagaactggcacatttgctcgacatgaactcgtccgaaatcacggaccgctgaaaatcgccggacggcatatttcagttgatgcaccgtttgctcaggcgacgacaaccgtttgctcgatgtgcttcaaaacgactcgcagcgcccgatcatggcttgctccaagagtcgcttcggcttgaagtcgagcgctcgtttcggcactttcgccgcgcgaagccgatgtaattcgctcgtattttggatcggcatggaaaatccgctgacgcttgaggaaatcggcgagcgctttagctcacccgcgagcgcgtccggcaaatcaaggaaaaagcgattcgccgctgcgccattcgccatatagcaatgtgctaaaagaatatatcggacacta

SEQ ID NO: 1240 - protein, 298 aa, Chloroherpeton thalassium ATCC 35110
MRQLKISKQITNRESQSLDRYLQEIGKFDLLTAQEEIELTRQIKKGDGQPIDSKEYREARRALEKLIKANLRFVVSVAKQYQNQGLSLGDLINEGNLGLIKAAKRFDETRGFKFISYAVWWIRQSILQALAEQSRIVRLPLNRVGTLNKIGKAFSQLEQEYERDPSTEELAHLLDMNSSEITDTLKIAGRHISVDAPFAQGDDNRLLDVLQNDSQRPDHGLLQESLRLEVERSLSALSPREADVIRSYFIGMENPLTLEEIGERFKLTRERVRQIKEKAIRRLRHSPYSNVLKEYIGH

SEQ ID NO: 1241 - DNA, 499 bp, Chloroherpeton thalassium ATCC 35110
atgtcggaacttgcactaggattaatcgagacacggggcttaattgccgcattgaagcagcagatgccgcgctcaaagcggctgatgttaggctaattctaaagatcgggtcgatggtgcattaatcacgataaaacttacgggcgagttgctgctgttcaagctgccgtggatgcaggagcagcagccgctcaactgtcggagttttagtttcagcccatgtgattgctcggcccgataaaggcttcacgatacacttgctttcgttcgtattgacagcaaaaaaaagaaaccctcgcagcacctgctgagcacgatggctcaaacctaagccaagcaccttttctgacttagcaccgtcctcagaaacactgaagcaatacacggttgaaatttgcgacggatggccagaaaagttgaaggattgccaatacaaggacggaaatttctcgcgccaataaagaagaattgatccaactgatttgccaatcaccgcgta

SEQ ID NO: 1242 - protein, 168 aa, Chloroherpeton thalassium ATCC 35110
MSELALGLIETRGLIAAIEAADAALKAADVRLISKDRVDGALITIKLTGDVAAVQAAVDAGAAAAQRVGVLVSAHVIARPDKGIHDTLAFVRIDSKKKKPLAAPAEHDGSNLSQAPSSDLAPSSETLKQYTVEDLRRMARKVEGLPIQGREISRANKEELIQLICQYT

SEQ ID NO: 1243 - DNA, 270 bp, Chloroherpeton thalassium ATCC 35110
atgtcaatggatgctcttggaatgatagaaaccaaaggacttgtcggcgcatcgaagccgctgatgcgatggttaaagcggcgaacgttgacttgatagcaaagagactattggcggcggttttgtaacggttatggttcgcggcgagtgggcgctgttaaagcagcaaccgatgcaggggcagcagccgctcaaccgttggcgaattagtttccgtccatgtcattccgcgtccgcattcggaattgaagcgatccttcctaagaagta

SEQ ID NO: 1244 - protein, 91 aa, Chloroherpeton thalassium ATCC 35110
MSMDALGMIETKGLVGAIEAADAMVKAANVDLIGKETIGGGFVTVMVRGDVGAVKAATDAGAAAAQRVGELVSVHVIPRPHSEVEAILPKK

SEQ ID NO: 1245 - DNA, 685 bp, Chloroherpeton thalassium ATCC 35110
atgagcaaagccgaaacaacacagattgaacccgatacgacctcaaaaaagagcagcaaattgattacaaaaatgagcttgcgcgaaaagccattcattttcatctatttccattccgattgtttatttccacatctcgcgcgagctgcgttgctgcttcttttccctttattcttaggttttttcctcgtagatttttgcgcatttatgtaaaacccatttcaaaatggtactataaaacgttcgctcgatgcttcgcgcacacgagttggacgacgaaaaacctcgctttaaggggcaacctatgtcacattttcggcttgcttggttgtcgccttttttcaaaaatgattgccattgccgcgttttcaattttaatcatttcggattcgttgccgcgctgattggcagaaagtttggccggcataaaattgcaggaaatcgtttgagggaagttttgcgttttttgtttcggcgattttaatcgtgccaacacgccaaaattggacttgatggccggcattattatgtcagccgttcaaccattgtggaactatatccaatcaaattcttggacattacaatcgagataatttaacggtgccaattattggcgccattgcgtcctatttgtattcatgatctttttgcaaggggatatttcgctcatttgcgaacttcatta

SEQ ID NO: 1246 - protein, 232 aa, Chloroherpeton thalassium ATCC 35110
MSKAETTQIEPDTTSKTEQQIDYKNELARKAIHLSSISIPIVYFHISRELALLLLFPLFLGFFLVDFLRIYVKPISKWYYKTFSSMLRAHELDDEKPRFNGATYVTFSACLVVAFFPKMIAIAAFSILIISDSVAALIGRKFGRHKIAGKSFEGSFAFFVSAILIVLNTPKLDLMAGIIMSAVATIVELYPIKFLDITIDDNLTVPIIGAIASYLYYMIFLQGDISLICELH

SEQ ID NO: 1247 - DNA, 288 bp, Chloroherpeton thalassium ATCC 35110
atgttgctttgtagagtgatcggctcggtggtttcaacacataaaaataaaatttggcacaggcgaaactgctttttgtcaagccggtcgatgtgaataaaagttcacgaaggaacgcgaatttattgcgatcgatacggtcgacgcggcgaaggcgacctggttttggtagcgcaagaaggctctgtggtcaagcaattatgcagtcgaagtttgttccggccaacgccattattttgggcgttttgacggccttcacatttgcgagtcggagaccgctgcgagtta

SEQ ID NO: 1248 - protein, 96 aa, Chloroherpeton thalassium ATCC 35110
MLLCRVIGSVVSTHKNKNLAQAKLLFVKPVDVNQKFTKEREFIAIDTVDGEGDLVLVAQEGSVVKQIMQSKFVPANAIILGVVDGLHICESETAAS

SEQ ID NO: 1249 - DNA, 1816 bp, Chloroherpeton thalassium ATCC 35110
atgaacaaaggacaaggatttcaaattcaagccgacgccccaacctcggaaaaggctcaggcaaaggcattgatcgcgcgctgctcaaacggttgctaattatgttcaaccctacaaaggcttgcttatagccgccacatttcttacatttttggtgctgggctttcaccgctccgcccgtatctgaccaaaatcgcgtcgacgattatatcgctaaaaacgatctcgaaggcctcgttcacatcgccttcttcttggattggtcgttctacttgatagcgcaaaaatttatgggcaacatatctcacgcaattgcttggccagcgcgctgtgatggcgcttccatggacattttcaagcatttgcaaaaactttcgcttcgctttttcgatgcaacccaattggccgtttgatgacgcgcgccacgaacgatgtagaatcctgaacgaaatgctttcaagcggccttgtggcgctcatcggcgatgtgtccagctgacattcatcatcgtcctgatgattatgctcgattggcaactccgctcgtaaccatgagcgtcttgcctatcatggtctatattacttttcttttaagaaaaaagtccgcgtggtttatcaggatgtgcgcacgcaagttggcgcctgaattcgtttttgcaggaacacatcaccggcatggccacaattagcttttcgggcgtgagccgcaggaatttgaaaaacacactgaaattaggccgcgcatcgcgatgccaatatccgatcgattcattactactccatttttacccgaccattgaatttttgagctcagttgccatgggcttgattattggcacagcggcgccagaatgctcgacggcacacttacggttggcattgtatttcgttcgtgcaatttgtgacgcagtttttcaggccgctgcaagatcttcggaaaaatacaacatcatgcaaacggcgatttccagcgccgaacgcttttttcactgctggacgaaaaagaaatcatcgatgaaccgaaaaatccatcgcgctgaaagaagtgaaaggccacattcgatttgaaaacgtctcgtcgcttataacgatgaaaattgggtacttcgcgatatcgattttgaggtcagcctggcgagaaagttgcaattgttggcgcgacgggcagcggcaaaacaccattatcagcctgctttcgcgcttttatgatattcaaaaagggacgattccatcgatggaaatgacatcaagcaaatccacgaacgcgttttgcgcagcatcttggcgttgtgatgcaggatgtgtttctcttttcgggcacgatcgcgaaaatatcaccctcggtaatccagacatcacggacgaagacattcgaaagcggcgaaacttgtcggcgcggcggcgtttatccaaaaattgcccgcggttatgattatcaagttatggaacgcggcggcgcactttcgaccggcagcgccaattgatttcgtttgttcgcgcgatggtttataatcccaagatttgattttggacgaagccaccagttccgtcgacaccgaaacggaatattgatcgaatctgcgatgcaaaccttaatgaaaggccgcacctcgattgtattgcgcaccgactttctactgtgcaacgcgccgacaaaatcatcgtgcgcacaagggtgtgattcgcgaggtcggctcgcaccaagaattgttgcaaagcgcgggctgtactacaagctttacctcttgcaatatcctgaactcttcacaaacaagccggcttcgacgaggaaagcttgaacacagatgttttgatta

SEQ ID NO: 1250 - protein, 613 aa, Chloroherpeton thalassium ATCC 35110
MNKGQGFQIQADAPTSGKGSGKGIDRALLKRLLHYVQPYKGLLIAATFLIFGAGLSPLRPYLTKIAVDDYIAKNDLEGLVHISLLLGLVVLLDSAKIYATYLTQLLGQRAVMALRMDIFKHLQKLSLRFFDRNPIGRLMTRATNDVESLNEMLSSGLVALIGDVFQLTFIIVLMIMLDWQLTLVTMSVLPIMVYITFLFKKKVRVVYQDVRTQVARLNSFLQEHITGMATIQLFGREPQEFEKHTEISAAHRDANIRSIHYYSIFYPTIEFLSSVAMGLIIWHSGARMLDGTLTVGIVISFVQFVTQFFRPLQDLSEKYNIMQTAISSAERIFSLLDEKEIIDEPKNPIALKEVKGHIRFENVSFAYNDENWVLRDIDFEVKPGEKVAIVGATGSGKTIISLLSRFYDIQKGTISIDGNDIKQIHERVLRQHLGVVMQDVFLFSGTIRENITLGNPDITDEDIQKAAKLVGAAAFIQKLPGGYDYQVMERGGALSTQRQLISFVRAMVYNPKILILDEATSSVDTETEYLIESAMQTLMKGRTSIVIAHRLSTVQRADKIIVLHKGVIREVGSHQELLQKRGLYYKLYLLQYPELLHKQAGFDEESLNTDVLS

SEQ ID NO: 1251 - DNA, 305 bp, Anabaena variabilis ATCC 29413
atgccaatggcggttggcgtaatcgaaactttaggatttccggctgtgcagcggcagcagatgcgatggtaaaatctgccgcagtcaccattgtctatatggtcaggcggagagcgcccgcttgttagttgcagtgaggggacacgtgcagaagtaagacgagccgttgaggcgggaattgaggctggtgagcaagacacggtggtgaagtcatcacccactacatagttcccaatcctcccgaaatgtggtagatattctccccattcactttactgaagaatcagaacccttcggatgttcta

SEQ ID NO: 1252 - protein, 103 aa, Anabaena variabilis ATCC 29413
MPMAVGVIETLGFPAVLAAADAMVKSAAVTIVYYGQAESARLLVAVRGHVAEVRRAVEAGIEAGEQAHGGEVITHYIVPNPPENVVDILPIHFTEESEPFRMF

SEQ ID NO: 1253 - DNA, 346 bp, Anabaena variabilis ATCC 29413
atgtcatcactacaggcagtgggagcattagagactaagggttttccggtgtgttagcagcagcagatgctatggtcaaagctggccgtgtcaccctttgggttatatccgggttggtagcgctcgttttacagtcaatatccgtgggatgtttcggaagttaaaacggcaatggcggctggtgtggaagccgcacaaatgtttacggtggtacattagaatcctgggtgattattcctcgtcccatgaaaacgttgaagcagtcctacctattggttatacggatgctgttcacaatatcgagattctgtagaaaatcccattatccgttcatccaacggacata

SEQ ID NO: 1254 - protein, 116 aa, Anabaena variabilis ATCC 29413
MSSLQAVGALETKGFPAVLAAADAMVKAGRVTLVGYIRVGSARFTVNIRDVSEVKTAMAAGVEAAQNVYGGTLESWVIIPRPHENVEAVLPIGYTDAVQQYRDSVENPIIRSSNGR

SEQ ID NO: 1255 - DNA, 629 bp, Anabaena variabilis ATCC 29413
ttgggaatagaactacgcagtttcgtatttctcgacagcctgcaaccacacacgcggcctatataggaacagtagcccaaggtttcttgccattaccagagatacatcactgtggattgaaatctctcctggtatcgagattaataaattaccgatatagccctcaaagccgcctctgtccgccctggagtacaagagttgagagactatacggtctattggaagtacattcaggctcccaaggcaaacgcgggctgctggtcaagcgattttggcagctcttggagtcaaaaggaagagtgtattaaaccgcgaattgtttccagccagattatcaggaataagatgcttaccaaacccaactgatcaaccggacgcgacgaggacagctatactagccggacagactctatatgtattagaggttgagcctgctgcttagctgctctagccgctaatgaagccgagaaagcagcttcaattaacattcagaagttcaagctgtcggtagttttggcaggttgtatttaggtgggcaaaaagggatattctcgcaggtgcggcgggagcgagagcagccatagaaaggtagctggccggagcaattccccaagtggtcgccaggagta

SEQ ID NO: 1256 - protein, 213 aa, Anabaena variabilis ATCC 29413
MGIELRSFVFLDSLQPQHAAYIGTVAQGFLPLPGDTSLWIEISPGIEINKITDIALKAASVRPGVQVVERLYGLLEVHSGSQGETRAAGQAILAALGVKREECIKPRIVSSQIIRNIDAYQTQLINRTRRGQLLLAGQTLYVLEVEPAAYAALAANEAEKAASINILEVQAVGSFGRLYLGGQERDILAGAAGARAAIESVAGRSNSPSGRQE

SEQ ID NO: 1257 - DNA, 790 bp, Anabaena variabilis ATCC 29413
atggcaaatctagagcatctagctttattacgagcaggtgcagtgagatgattgagtggagacaagaaaatccgcaaattgaaccagacctcagcacccaaacttacaagaaaataacctcaggggcgcaaatctcgaaggtactaattaagccgagtggacttaagtcatgctctgcttgtacgtgctaacctcatggtgctgacctcagtagcgccaacctctatcaagcaaaaatcagtgaactaacttgagtgcagctaattttagtgtggctaacttgagtcaatcgatcttacacaagcagatttaagccatgctcatttcattggtgctgattttatggagccaatctccggggtgctattgtggcggaggctaacttaattggtctgacttcagtagtgctgatttgagagatgctgatttggctggagcaaactcatccgctctaacctttgttttgcgaatcttatcgctgctaatctcatgcggccgatttcagcgaggcaaatctatatcaagcagaagtgatgggacttacctttacaaagccaacttctacaaagctaatctacataaagcacactaggaggtgcatacctattccgggcaaatttaaccgcagctgacttgaaggcgctgacttagcctgggctaatctcaccagtgctaatttagctgggctaatctgagtggggctaatcttagaggggctaatttgaaaggtgctaacttaatggagtcaatcttcaagaaacaattatgcctgactcttccaggctgatta

SEQ ID NO: 1258 - protein, 268 aa, Anabaena variabilis ATCC 29413
MANLEHLALLRAGAVRWIEWRQENPQIEPDLSTANLQENNLRGANLEGTNLSRVDLSHALLVRANLSGADLSSANLYQAKISEANLSAANFSVANLSQSILTQADLSHAHFIGADFSGANLRGAIVAEANLIGTDFSSADLRDADLAGAKLIRSNLCFANLIAANLIAADFSEANLYQAEVMGAYLYKANFYKANLHKAHLGGAYLFRANLTAADLRGADLAWANLTSANLAGANLSGANLRGANLKGANLNGVNLQETIMPDSSRHD

SEQ ID NO: 1259 - DNA, 1220 bp, Anabaena variabilis ATCC 29413
atgagttattatatcgctccgcgctttctggataaacttgctgttcacacaccaaaaactttttaaatattcctggtgtgcgagttcccttaattttaggattcatggacgtaaaggagaagggaaaacctttcagtgtgagttagctttgagaagatgggtattgaagtcacactcatctccggcggtgaattggaagtcccgatgcgggagacccagcccggttgattcggctgcgctatcggaaacggcagaactgattaaagtgcggggtaaaatgtgcgtgctgatgataacgatttagatgcaggtgcaggacgctttgatgaaggtacgcaatatatgtaaatactcagttggtaaatgccacactgatgaatattgccgataatccacagatgtacagttacccggtagttatgattccaacccgatacggcggtccccattatcgtgacaggtaatgatttttctactctctacgcaccatgattcgggatggacggatggagaaattctattgggaacccaaccgcgatataaggtgggaattgtcggggggatttttgctgaggatggactctcaaacgagaaattgaacaattagttgatactttccccaagcaatcgattgactttttagcgctttacgttctcgaatttacgacgaacaaatccgcgacttttccatcaagttgggtttgaacgtatatctctacgtgttgtgaacagcgtgaagcgccgccagaatttaaaaagccagatttcagccttgctcatttgacgagtctggtaacttggtgttgggtgaacaacaacgggtagacaattctagctagtggatgagtataatcgattgaatcgcgggaggggttatcaagcgcgccaccgcctgaagcgcccatgattcagccagtcaataatagttctccaagcgagagacatctaatactcatttgagtttagaaacccaagaacaatccggcaaatcttgtctcaaggtcacaaaattacttttgaacacgtagagcacgccgcttccgcacgggttcttggcaaagttgcggtactctgcatatgatgcagagtcagatgctatttcaacactagaggcttgcttagttgatatgagggtgagtatgtgcgcttggtagggatagacccgaaaggtaagcgcgggttgtggagacaattattcaacgaccaaatgacaaaaacta

SEQ ID NO: 1260 - protein, 412 aa, Anabaena variabilis ATCC 29413
MSYYIAPRFLDKLAVHITKNFLNIPGVRVPLILGIHGRKGEGKTFQCELFEKMGIEVTLISGGELESPDAGDPARLIRLRYRETAELIKVRGKMCVLMINDLDAGAGRFDEGTQYTVNTQLVNATLMNIADNPTDVQLPGSYDSNPIRRVPIIVTGNDFSTLYAPLIRDGRMEKFYWEPNRDDKVGIVGGIFAEDGLSKREIEQLVDTFPKQSIDFFSALRSRIYDEQIRDFIHQVGFERISLRVVNSVEAPPEFKKPDFSLAHLIESGNLVLGEQQRVDNSQLVDEYNRLNRGRGYQAPPPEAPMIQPVNNSSHKRETSNTHLSLETQEQIRQILSQGHKITFEHVDARRFRTGSWQSCGTLHIDAESDAISTLEACLVDYEGEYVRLVGIDPKGKRRVVETIIQRPNDKN

SEQ ID NO: 1261 - DNA, 1246 bp, Trichodesmium erythraeum IMS101
atgccatattatatatcacctagattcatagataaactagcagtacatataccaaaaacttcttagaaatccccagaataagggtacctttaataatagaatacacggacgaaaaggagaaggaaaaacatttcaatgccaattagttttgagaaaatgggaatagaacctgtcacaatatctggtggagaattagaagtaaagatgcgggagatcctgcacgtttattacgtctacgttatagaaagcgtcagaaaaagttaaagttcaaggtcgaatgtgtgctttatttataatgacttagatgcaggtgctggtagatttgatgggggtactcaatataggtaaatactcaattagtaaatgctactttaatgaatattgctgataacctacaaatgtacaattaccaggcagctacgatgaaactcccttacatcgataccaattattgtgactggaaatgatttttctactctttatgcgccttaattagagatggtcgaatggagaaattttattgggaaccaaatagagaaatagagttggcatagtaggtagcatatttaaaacagatgaactttctacggagatattgataatttaatagatgaattttctgaccaggctatcgattttttagtgccttacgaagtcggatatatgatgaacaaattcgtgattttttcaccaagtaggaatagaaaaaatttctaggcgggtagtaaattctgtgaaaagattcccgattttcctcaacctacttttaatgtttcccgtcttcagagtatggaaaaattatggttggagaacaagaacgtattcgagaattggtttagtagaagaatataataaatctcgattgtttggtgtttttaaaacagtcaacgagaaaatattacgccaaattctaatggattatttcccgaagaactacggaaaataagttaaatgcaaatcggattaatcatagtattaaagtagtaatcttagttcagaagtgagggaaaaaatacaaaaaattctcgagatggtggaaaaattgggatggaatatgcagataaacgtagatataaaatggttcatggaaaagttgtggaaaaatagagaatggggaagtaaaagagtgataaatgctgtagaaaattgtttagttaaacatcaaaatgattatgtcgtttgattggtattgatgggaatgtgaagcgacggatagttgagaaaatatttataggcccgatatata

SEQ ID NO: 1262 - protein, 421 aa, Trichodesmium erythraeum IMS101
MPYYISPRFIDKLAVHITKNFLEIPRIRVPLIIGIHGRKGEGKTFQCQLVFEKMGIEPVTISGGELESKDAGDPARLLRLRYREASEKVKVQGRMCALFINDLDAGAGRFDGGTQYTVNTQLVNATLMNIADNPTNVQLPGSYDETPLHRIPIIVTGNDFSTLYAPLIRDGRMEKFYWEPNREDRVGIVGSIFKTDELSGDIDNLIDEFSDQAIDFFSALRSRIYDEQIRDFIHQVGIEKISRRVVNSVEKIPDFPQPTFNVSRLLEYGKIMVGEQERIRELGLVEEYNKSRLFGVFKSQRENITPNSNGLFPEVTTENKLNANRINHSIKSSNLSSEVREKIQKILEDGGKIGMEYADKRRYKTGSWKSCGKIENGEVKEVINAVENCLVKHQNDYVRLIGIDGNVKRRIVEKIIYRPDI

SEQ ID NO: 1263 - DNA, 626 bp, Trichodesmium erythraeum IMS101
ttgggtatagaactgcgcagttatgtatttatagacaacttgcaacctcgcacgccgcctatattggtacagtagcccttggctttttaccactaccagtgatacctctctatggatagaaatttctcctggtattgaaattaatcgattacagatgtagctctcaaatctaactctgtgcgaccaggggtacaattgtggagcgactttatggtttgttggaaattcattccagtcgtcagggaatacaaaagctgctggtcaagcaattttgcaatctttagaggttattgaagcgatcgcctgaaacctcgtattatctctagtcaggtgatccgtaatatgactctcaccaagcacagttaattaatcgtaatcgtcgtggccaaatgttttaggtggccaaactctctatgttttagaagtccaacctgccgcctagctgctttagcagccaatgaagcagaaaaagctgctttaattaatatttacaaattcaagccgtaggtagttttggacgactttatttgggaggagaaaacgggatattttggcaggttctcaagcagctttggaggccatgaaaaagtttcgggtcgagaacattttgaccaacgccaagaata

SEQ ID NO: 1264 - protein, 212 aa, Trichodesmium erythraeum IMS101
MGIELRSYVFIDNLQPQHAAYIGTVALGFLPLPGDTSLWIEISPGIEINRITDVALKSNSVRPGVQFVERLYGLLEIHSSRQGDTKAAGQAILQSLEVIESDRLKPRIISSQVIRNIDSHQAQLINRNRRGQMILGGQTLYVLEVQPAAYAALAANEAEKAALINILQIQAVGSFGRLYLGGEERDILAGSQAALEAMKNVSGREHFDQRQE

SEQ ID NO: 1265 - DNA, 298 bp, Trichodesmium erythraeum IMS101
atgccagaagcagtaggtgtcatagaagctattggttttccaggaatctagctgctgcagatgcgatggtcaaagctgcacgagttaccttagtttacatggtatagccgaaagaggccactttttagtggcagttcggggaccaactctgaagttcgtccttcagtccaagctggtattgaagcagcagaaaaagttatggtggtatagtggacagtcattatattgttcctaatcccccggagatgtagaatctgtattaccactagaatatacagaagttagcgaacagttagat

SEQ ID NO: 1266 - protein, 100 aa, Trichodesmium erythraeum IMS101
MPEAVGVIEAIGFPGILAAADAMVKAARVTLVYYGIAERGHFLVAVRGPSEVRPSVQAGIEAAEKVYGGIVDSHYIVPNPPENVESVLPLEYTEVSEQFR

SEQ ID NO: 1267 - DNA, 349 bp, Trichodesmium erythraeum IMS101
atggcgcaacaagctgttggagcactggagactaaaggttttcctggtacttagctgctgcagatgcaatggtcaaagctggtagagttactttagttgttatattagggttggtagtgcgaggtttactgttcaaattagaggtgagtttcggaagtaaaaactgctatggatgccggaattgcagcagtagataagcttatggtgctaccttagaatcttgggtaattattcctcgtcctcacagaatgttgtggcagttttaccaatagactttaatccaggtgtagaagatttcgccaacaagtagaaggaataactgtaccaggattgcgtagtagtatatata

SEQ ID NO: 1268 - protein, 118 aa, Trichodesmium erythraeum IMS101
MAQQAVGALETKGFPGILAAADAMVKAGRVTLVGYIRVGSARFTVQIRGDVSEVKTAMDAGIAAVDKAYGATLESWVIIPRPHENVVAVLPIDFNPGVEEFRQQVEGITVPGLRSSSI
